(19) United States
(12) Patent Application Publication
(10) Pub. No.: US 2023/0123192 A1
(43) Pub. Date: Apr. 20, 2023

(54) ANGIOTENSINOGEN (AGT) iRNA COMPOSITIONS AND METHODS OF USE THEREOF

(71) Applicant: Alnylam Pharmaceuticals, Inc., Cambridge, MA (US)

(72) Inventors: Donald Foster, Attleboro, MA (US); Brian Bettencourt, Groton, MA (US); Klaus Charisse, Acton, MA (US); Gregory Hinkle, Plymouth, MA (US); Satyanarayana Kuchimanchi, Acton, MA (US); Martin A. Maier, Belmont, MA (US); Stuart Milstein, Arlington, MA (US)

(21) Appl. No.: 17/855,851

(22) Filed: Jul. 1, 2022

Related U.S. Application Data
(63) Continuation of application No. 17/020,954, filed on Sep. 15, 2020, now Pat. No. 11,419,942.
Application No. 17/020,954 is a continuation of application No. 16/274,393, filed on Feb. 13, 2019, now Pat. No. 10,814,007.
Application No. 16/274,393 is a division of application No. 15/313,145, filed on Nov. 22, 2016, now Pat. No. 10,238,749.
(60) Provisional application No. 62/047,978, filed on Sep. 9, 2014.
(60) Provisional application No. 62/001,731, filed on May 22, 2014.

(51) Int. Cl. A61K 47/54; C12N 15/113; A61K 45/06

(52) U.S. Cl. CPC A61K 47/549; C12N 15/113; A61K 45/06; C12N 2310/14; C12N 2310/343; C12N 2310/351; C12N 2320/32; C12N 2320/51

(57) ABSTRACT

The present invention relates to RNAi agents, e.g., double-stranded RNAi agents, targeting the angiotensinogen (AGT) gene, and methods of using such RNAi agents to inhibit expression of AGT and methods of treating subjects having an AGT-associated disorder, e.g., hypertension.

### CROSS-REFERENCE TO RELATED APPLICATIONS

[0001] This application is a continuation of U.S. patent application Ser. No. 17/020,954, filed on Sep. 15, 2020, which is a continuation of U.S. patent application Ser. No. 16/274,393, filed on Feb. 13, 2019, now U.S. Pat. No. 10,814,007, issued on Oct. 27, 2020, which is a divisional of U.S. patent application Ser. No. 15/313,145, filed on Nov. 22, 2016, now U.S. Pat. No. 10,238,749, issued on Mar. 26, 2019, which is a 35 U.S.C. § 371 National Stage Filing of International Application No. PCT/US2015/032099, filed on May 22, 2015, which claims the benefit of and priority to U.S. Provisional Application No. 62/001,731, filed on May 22, 2014, and U.S. Provisional Application No. 62/047,978, filed on Sep. 9, 2014. The entire contents of each of the foregoing applications are hereby incorporated herein by reference.

### SEQUENCE LISTING

[0002] The instant application contains a Sequence Listing which has been submitted electronically in XML file format and is hereby incorporated by reference in its entirety. Said XML copy, created on Jul. 27, 2022, is named 121301_01306_SL.xml and is 3,583,825 bytes in size.

### BACKGROUND OF THE INVENTION

[0003] The renin-angiotensin-aldosterone system (RAAS) plays a crucial role in the regulation of blood pressure. The RAAS cascade begins with the release of renin by the juxtaglomerular cells of the kidney into the circulation. Renin secretion is stimulated by several factors, including Na+ load in the distal tubule, β-sympathetic stimulation, and/or reduced renal perfusion. Active renin in the plasma cleaves angiotensinogen (produced by the liver) to angiotensin I, which is then converted by circulating and locally expressed angiotensin-converting enzyme (ACE) to angiotensin II. Most of the effects of angiotensin II on the RAAS are exerted by its binding to angiotensin II type 1 receptors (AT₁R), leading to arterial vasoconstriction, tubular and glomerular effects, such as enhanced Na+ reabsorption or modulation of glomerular filtration rate. In addition, together with other stimuli such as adrenocorticotropin, anti-diuretic hormone, catecholamines, endothelin, serotonin, and levels of Mg2+ and K+, AT₁R stimulation leads to aldosterone release which, in turn, promotes Na+ and K+ excretion in the renal distal convoluted tubule.

[0004] Dysregulation of the RAAS leading to, for example, excessive angiotensin II production and/or AT₁R stimulation results in hypertension which can lead to, e.g., increased oxidative stress, promotion of inflammation, hypertrophy, and fibrosis in the heart, kidneys, and arteries, and result in, e.g., left ventricular fibrosis, arterial remodeling, and glomerulosclerosis.

[0005] Hypertension is the most prevalent, controllable disease in developed countries, affecting 20-50% of adult populations. It is a major risk factor for various diseases, disorders and conditions such as, shortened life expectancy, chronic kidney disease, stroke, myocardial infarction, heart failure, aneurysms (e.g. aortic aneurysm), peripheral artery disease, heart damage (e.g., heart enlargement or hypertrophy) and other cardiovascular related diseases, disorders and/or conditions. In addition, hypertension has been shown to be an important risk factor for cardiovascular morbidity and mortality accounting for, or contributing to, 62% of all strokes and 49% of all cases of heart disease.

[0006] Despite the number of anti-hypertensive drugs available for treating hypertension, more than two-thirds of subjects are not controlled with one anti-hypertensive agent and require two or more anti-hypertensive agents selected from different drug classes. This further reduces the number of subjects with controlled blood pressure as compliance and side-effects increase with increasing medication.

[0007] Accordingly, there is a need in the art for alternative therapies and combination therapies for subjects having an angiotensinogen-associated disease.

### SUMMARY OF THE INVENTION

[0008] The present invention provides iRNA compositions which effect the RNA-induced silencing complex (RISC)-mediated cleavage of RNA transcripts of an angiotensinogen (AGT) gene. The AGT gene may be within a cell, e.g., a cell within a subject, such as a human.

[0009] The present invention also provides methods and therapies for treating a subject having a disorder that would benefit from inhibiting or reducing the expression of an AGT gene, e.g., an angiotensinogen-associated disease, such as hypertension, using iRNA compositions which effect the RNA-induced silencing complex (RISC)-mediated cleavage of RNA transcripts of an AGT gene for inhibiting the expression of an AGT gene.

[0010] Accordingly, in one aspect, the present invention provides double-stranded ribonucleic acid (RNAi) agents for inhibiting expression of angiotensinogen (AGT), which comprise a sense strand and an antisense strand forming a double-stranded region, wherein the sense strand comprises at least 15 contiguous nucleotides differing by no more than 3 nucleotides from the nucleotide sequence of SEQ ID NO:1 and the antisense strand comprises at least 15 contiguous nucleotides differing by no more than 3 nucleotides from the nucleotide sequence of SEQ ID NO:2, wherein substantially all of the nucleotides of the sense strand and substantially all of the nucleotides of the antisense strand are modified nucleotides, and wherein the sense strand is conjugated to a ligand attached at the 3′-terminus. In one embodiment, all of the nucleotides of the sense strand and all of the nucleotides of the antisense strand are modified nucleotides.

[0011] In another aspect, the present invention provides double-stranded ribonucleic acid (RNAi) agents for inhibiting expression of angiotensinogen (AGT), which comprise a sense strand and an antisense strand forming a double-stranded region, wherein the sense strand comprises at least 15 contiguous nucleotides differing by no more than 3 nucleotides from nucleotides 2801-2101; 803-843; 834-859; 803-859; 803-875; 834-875; 847-875; 1247-1271; 1566-1624; 1570-1624; 1584-1624; 1584-1624; 1584-1621; 2035-2144; 2070-2144; 2070-2103; 2201-2223; 2227-2360; 2227-2304; 2290-2318; 2304-2350; 2304-2326; 2320-2342; 2333-2360; 2333-2358; 485-503; 517-535; 560-578; 635-653; 803-821; 814-832; 822-840; 825-843; 834-852; 837-855; 841-859; 855-873; 967-985; 1247-1265; 1248-1266; 1249-1267; 1251-1269; 1253-1271; 1566-1584; 1570-1588; 1572-1590; 1574-1592; 1584-1602; 1587-1605; 1591-1609; 1592-1610; 1595-1613; 1601-1619; 1602-1620; 1605-1623; 1729-1747; 1738-1756; 1739-1757; 1741-1769; 1767-1785; 1810-1828; 1827-1845; 1880-1989; 1892-1914; 1894-1914; 1894-2012; 2035-2053; 2046-2064; 2057-2075; 2070-2088; 2072-2090; 2078-2096; 2078-2107; 2078-2011; 2080-2098; 2081-2099; 2081-2104; 2081-2011; 2082-2100; 2084-2102; 2084-2011; 2090-2108; 2100-2118; 2111-2129; 2124-2142; 2125-2143; 2167-2185; 2179-2197; 2201-2219; 2202-2220; 2203-2221; 2204-2222; 2227-2245; 2230-2248; 2234-2252; 2244-2264; 2255-2273; 2266-2284; 2268-2286; 2270-2288; 2279-2297; 2281-2299; 2283-2301; 2284-2302; 2285-2303; 2286-2304; 2288-2306; 2290-2308; 2291-2309; 2291-2311; 2291-2318; 2291-2315; 2292-2310; 2294-2312; 2296-2314; 2299-2317; 2304-2322; 2304-2329; 2306-2324; 2307-2325; 2309-2327; 2309-2329; 2309-2342; 2309-2350; 2309-2358; 2314-2332; 2316-2334; 2317-2335; 2320-2338; 2321-2339; 2323-2341; 2325-2343; 2326-2344; 2328-2346; 2329-2347; 2331-2349; 2333-2351; 2334-2352; 2335-2353; 2339-2357; 2340-2358; or 2341-2359 of the nucleotide sequence of SEQ ID NO:1 and the antisense strand comprises at least 15 contiguous nucleotides differing by no more than 3 nucleotides from the nucleotides at the corresponding position of the nucleotide sequence of SEQ ID NO:2 such that the antisense strand is substantially complementary to the at least 15 contiguous nucleotides in the sense strand. In certain embodiments, substantially all of the nucleotides of the sense strand are modified nucleotides. In other embodiments, substantially all of the nucleotides of the antisense strand are modified nucleotides. In yet other embodiments, substantially all of the nucleotides of both strands are modified nucleotides. In one embodiment, all of the nucleotides of the sense strand and all of the nucleotides of the antisense strand are modified nucleotides. In one embodiment, the sense strand is conjugated to a ligand attached at the 3′-terminus. In one embodiment, the sense strand comprises at least 15 contiguous nucleotides differing by no more than 3 nucleotides from nucleotides 2801-2101 of the nucleotide sequence of SEQ ID NO:1 and the antisense strand comprises at least 15 contiguous nucleotides differing by no more than 3 nucleotides from the nucleotides at the corresponding position of the nucleotide sequence of SEQ ID NO:2 such that the antisense strand is substantially complementary to the at least 15 contiguous nucleotides in the sense strand.

[0012] In one aspect, the present invention provides double-stranded ribonucleic acid (RNAi) agents for inhibiting expression of angiotensinogen (AGT), which comprise a sense strand and an antisense strand forming a double-stranded region, wherein the sense strand comprises at least 15 contiguous nucleotides from nucleotides 803-843; 834-859; 803-859; 1247-1271; 1566-1624; 1570-1624; 1584-1624; 1584-1624; 1584-1621; 2035-2144; 2070-2144; 2070-2103; 2201-2223; 2227-2360; 2227-2304; 2290-2318; 2304-2350; 2304-2326; 2320-2342; 2333-2360; 2333-2358; 485-503; 517-535; 560-578; 635-653; 803-821; 814-832; 822-840; 825-843; 834-852; 837-855; 841-859; 855-873; 967-985; 1247-1265; 1248-1266; 1249-1267; 1251-1269; 1253-1271; 1566-1584; 1570-1588; 1572-1590; 1574-1592; 1584-1602; 1587-1605; 1591-1609; 1592-1610; 1595-1613; 1601-1619; 1602-1620; 1605-1623; 1729-1747; 1738-1756; 1739-1757; 1741-1769; 1767-1785; 1810-1828; 1827-1845; 1880-1989; 1894-2012; 2035-2053; 2046-2064; 2057-2075; 2070-2088; 2072-2090; 2078-2096; 2080-2098; 2081-2099; 2082-2100; 2084-2102; 2090-2108; 2100-2118; 2111-2129; 2124-2142; 2125-2143; 2167-2185; 2179-2197; 2201-2219; 2202-2220; 2203-2221; 2204-2222; 2227-2245; 2230-2248; 2234-2252; 2244-2264; 2255-2273; 2266-2284; 2268-2286; 2270-2288; 2279-2297; 2281-2299; 2283-2301; 2284-2302; 2285-2303; 2286-2304; 2288-2306; 2290-2308; 2291-2309; 2292-2310; 2294-2312; 2296-2314; 2299-2317; 2304-2322; 2306-2324; 2307-2325; 2309-2327; 2314-2332; 2316-2334; 2317-2335; 2320-2338; 2321-2339; 2323-2341; 2325-2343; 2326-2344; 2328-2346; 2329-2347; 2331-2349; 2333-2351; 2334-2352; 2335-2353; 2339-2357; 2340-2358; or 2341-2359 of the nucleotide sequence of SEQ ID NO:1 and the antisense strand comprises at least 15 contiguous nucleotides differing by no more than 3 nucleotides from the nucleotides at the corresponding position of the nucleotide sequence of SEQ ID NO:2 such that the antisense strand is substantially complementary to the at least 15 contiguous nucleotides in the sense strand. In certain embodiments, substantially all of the nucleotides of the sense strand are modified nucleotides. In other embodiments, substantially all of the nucleotides of the antisense strand are modified nucleotides. In yet other embodiments, substantially all of the nucleotides of both strands are modified nucleotides. In one embodiment, the sense strand is conjugated to a ligand attached at the 3′-terminus.

[0013] In one embodiment, the sense strand and the antisense strand comprise a region of complementarity which comprises at least 15 contiguous nucleotides differing by no more than 3 nucleotides from any one of the antisense sequences listed in any one of Tables 3, 4, 7, 8, 11, 13, and 15. For example, in certain embodiments, the sense strand and the antisense strand comprise a region of complementarity which comprises at least 15 contiguous nucleotides differing by no more than 3 nucleotides from any one of the antisense sequences of the duplexes AD-52433.1, AD-52438.1, AD-52439.1, AD-52445.1, AD-52449.1, AD-52451.1, AD-52456.1, AD-52457.1, AD-52462.1, AD-52463.1, AD-52469.1, AD-52474.1, AD-55976.1, AD-55978.1, AD-55979.1, AD-55980.1, AD-55981.1, AD-55982.1, AD-55983.1, AD-55984.1, AD-55987.1, AD-55988.1, AD-55989.1, AD-55990.1, AD-55991.1, AD-55994.1, AD-55995.1, AD-55996.1, AD-55999.1, AD-56000.1, AD-56001.1, AD-56002.1, AD-56003.1, AD-56006.1, AD-56007.1, AD-56008.1, AD-56009.1, AD-56011.1, AD-56012.1, AD-56013.1, AD-56016.1, AD-56017.1, AD-56019.1, AD-56020.1, AD-56021.1, AD-56022.1, AD-56024.1, AD-56026.1, AD-56027.1, AD-56029.1, AD-56030.1, AD-56031.1, AD-56032.1, AD-56035.1, AD-56039.1, AD-56041.1, AD-56043.1, AD-56044.1, AD-56047.1, AD-56048.1, AD-56051.1, AD-56053.1, AD-56054.1, AD-56059.1, AD-56062.1, AD-56065.1, AD-56066.1, AD-60770.1, AD-60771.1, AD-60776.1, AD-60777.1, AD-60778.1, AD-60779.1, AD-60780.1, AD-60781.1, AD-60783.1, AD-60784.1, AD-60785.1, AD-60788.1, AD-60789.1, AD-60791.1, AD-60793.1, AD-60795.1, AD-60798.1, AD-60801.1, AD-67903.1, AD-67906.1, AD-67923.1, AD-67924.1, AD-67925.1, AD-67926.1, AD-67935.1, AD-67965.1, AD-67994.1, AD-67995.1, AD-67996.1, AD-68017.1, AD-68022.1, AD-68035.1, AD-68036.1, AD-68037.1, AD-68084.2, AD-68085.2, AD-68086.2, AD-68087.2, AD-68090.2, AD-68091.2, AD-68092.2, AD-68093.2, AD-68116.1, AD-68117.1, AD-68118.1, AD-68124.1, AD-68125.1, or AD-68126.1. In certain embodiments, the sense strand and the antisense strand comprise a region of complementarity which comprises at least 15 contiguous nucleotides of the region of complementarity of any one of duplexes AD-52433.1, AD-52438.1, AD-52439.1, AD-52445.1, AD-52449.1, AD-52451.1, AD-52456.1, AD-52457.1, AD-52462.1, AD-52463.1, AD-52469.1, AD-52474.1, AD-55976.1, AD-55978.1, AD-55979.1, AD-55980.1, AD-55981.1, AD-55982.1, AD-55983.1, AD-55984.1, AD-55987.1, AD-55988.1, AD-55989.1, AD-55990.1, AD-55991.1, AD-55994.1, AD-55995.1, AD-55996.1, AD-55999.1, AD-56000.1, AD-56001.1, AD-56002.1, AD-56003.1, AD-56006.1, AD-56007.1, AD-56008.1, AD-56009.1, AD-56011.1, AD-56012.1, AD-56013.1, AD-56016.1, AD-56017.1, AD-56019.1, AD-56020.1, AD-56021.1, AD-56022.1, AD-56024.1, AD-56026.1, AD-56027.1, AD-56029.1, AD-56030.1, AD-56031.1, AD-56032.1, AD-56035.1, AD-56039.1, AD-56041.1, AD-56043.1, AD-56044.1, AD-56047.1, AD-56048.1, AD-56051.1, AD-56053.1, AD-56054.1, AD-56059.1, AD-56062.1, AD-56065.1, AD-56066.1, AD-60770.1, AD-60771.1, AD-60776.1, AD-60777.1, AD-60778.1, AD-60779.1, AD-60780.1, AD-60781.1, AD-60783.1, AD-60784.1, AD-60785.1, AD-60788.1, AD-60789.1, AD-60791.1, AD-60793.1, AD-60795.1, AD-60798.1, AD-60801.1, AD-67903.1, AD-67906.1, AD-67923.1, AD-67924.1, AD-67925.1, AD-67926.1, AD-67935.1, AD-67965.1, AD-67994.1, AD-67995.1, AD-67996.1, AD-68017.1, AD-68022.1, AD-68035.1, AD-68036.1, AD-68037.1, AD-68084.2, AD-68085.2, AD-68086.2, AD-68087.2, AD-68090.2, AD-68091.2, AD-68092.2, AD-68093.2, AD-68116.1, AD-68117.1, AD-68118.1, AD-68124.1, AD-68125.1, or AD-68126.1.

[0014] In one embodiment, the antisense strand comprises a region of complementarity which comprises at least 15 contiguous unmodified nucleotides differing by no more than 3 nucleotides from the antisense nucleotide sequence of AD-67327 (5′-AUUAGAAGAAAAGGUGGGAGACU-3′; SEQ ID NO:537). In another embodiment, the region of complementarity consists of the antisense unmodified nucleotide sequence of AD-67327 (5′-AUUAGAAGAAAAGGUGGGAGACU-3′; SEQ ID NO:537). In one embodiment, the dsRNA comprises a sense strand consisting of the nucleotide sequence of 5′-UCUCCCACCUUUUCUUCUAAU-3′ (SEQ ID NO:499), and an antisense strand consisting of the nucleotide sequence of 5′-UUAGAAGAAAAGGUGGGAGACU-3′ (SEQ ID NO:1051). In one embodiment, the double-stranded RNAi agent comprises the modified nucleotide sequence of AD-67327 (5′-uscsucccAfcCfUfJfuucuucuaau-3′; SEQ ID NO:1037 and 5′-asUfsuagAfagaaaagGfuGfggagascsu-3′; SEQ ID NO:1038.

[0015] In some embodiments, the modified nucleotide(s) is independently selected from the group consisting of a 2′-O-methyl modified nucleotide, a 2′-fluoro modified nucleotide, a nucleotide comprising a 5′-phosphorothioate group, and a terminal nucleotide linked to a cholesteryl derivative or a dodecanoic acid bisdecylamide group. In further embodiments, the modified nucleotide is selected from the group consisting of a 2′-deoxy-2′-fluoro modified nucleotide, a 2′-deoxy-modified nucleotide, a locked nucleotide, an unlocked nucleotide a conformationally restricted nucleotide, a contrained ethyl nucleotide, an abasic nucleotide, a 2′-amino-modified nucleotide, a 2′-alkyl-modified nucleotide, a 2′-O-allyl modified nucleotide, a 2′-C-allyl modified nucleotide, a 2′-hydroxyl modified nucleotide, a morpholino nucleotide, a phosphoramidate, and a non-natural base comprising nucleotide.

[0016] In another embodiment of the double-stranded RNAi agent, at least one strand comprises a 3′ overhang of at least 1 nucleotide. In another embodiment, at least one strand comprises a 3′ overhang of at least 2 nucleotides.

[0017] In another aspect, the present invention provides RNAi agents, e.g., double-stranded ribonucleic acid (RNAi) agents capable of inhibiting the expression of angiotensinogen (AGT) in a cell, wherein the double-stranded RNAi agent comprises a sense strand complementary to an antisense strand, wherein the antisense strand comprises a region complementary to part of an mRNA encoding AGT, wherein each strand is about 14 to about 30 nucleotides in length, wherein the double-stranded RNAi agent is represented by formula (III):

sense: 5′nₚ-Nₐ-(XXX)ᵢ-N_{b}-YYY-N_{b}-(ZZZ)ⱼ-Nₐ-n_{q}3′

antisense: 3′nₚ′-Nₐ′-(X′X′X′)ₖ-N_{b}′-Y′Y′Y′-N_{b}′-(Z′Z′Z′)ₗ-Nₐ′-n_{q}′5′ (III)

[0018] wherein:

[0019] i, j, k, and l are each independently 0 or 1;

[0020] p, p′, q, and q′ are each independently 0-6;

[0021] each Nₐ and Nₐ′ independently represents an oligonucleotide sequence comprising 0-25 nucleotides which are either modified or unmodified or combinations thereof, each sequence comprising at least two differently modified nucleotides;

[0022] each N_{b} and N_{b}′ independently represents an oligonucleotide sequence comprising 0-10 nucleotides which are either modified or unmodified or combinations thereof;

[0023] each nₚ, nₚ′, n_{q}, and n_{q}′, each of which may or may not be present, independently represents an overhang nucleotide;

[0024] XXX, YYY, ZZZ, X′X′X′, Y′Y′Y′, and Z′Z′Z′ each independently represent one motif of three identical modifications on three consecutive nucleotides;

[0025] modifications on N_{b} differ from the modification on Y and modifications on N_{b}′ differ from the modification on Y′; and

[0026] wherein the sense strand is conjugated to at least one ligand.

[0027] In one embodiment, i is 0; j is 0; i is 1; j is 1; both i and j are 0; or both i and j are 1.

[0028] In another embodiment, k is 0; 1 is 0; k is 1; 1 is 1; both k and 1 are 0; or both k and 1 are 1.

[0029] In one embodiment, XXX is complementary to X′X′X′, YYY is complementary to Y′Y′Y′, and ZZZ is complementary to Z′Z′Z′.

[0030] In one embodiment, the YYY motif occurs at or near the cleavage site of the sense strand.

[0031] In another embodiment, the Y′Y′Y′ motif occurs at the 11, 12 and 13 positions of the antisense strand from the 5′-end.

[0032] In one embodiment, Y′ is 2′-O-methyl.

[0033] In one embodiment, formula (III) is represented by formula (IIIa):

sense: 5′nₚ-Nₐ-YYY-Nₐ-n_{q}3′

antisense: 3′n_{p′}-N_{a′}-Y′Y′Y′-N_{a′}-n_{q′}5′ (IIIa).

[0034] In another embodiment, formula (III) is represented by formula (IIIb):

sense: 5′nₚ-Nₐ-YYY-N_{b}-ZZZ-Nₐ-n_{q}3′

antisense: 3′n_{p′}-N_{a′}-Y′Y′Y′-N_{b′}-Z′Z′Z′-N_{a′}-n_{q′}5′ (IIIb)
[0035] wherein each N_{b} and N_{b}′ independently represents an oligonucleotide sequence comprising 1-5 modified nucleotides.

[0036] In yet another embodiment, formula (III) is represented by formula (IIIc):

sense: 5′nₚ-Nₐ-XXX-N_{b}-YYY-Nₐ-n_{q}3′

antisense: 3′n_{p′}-N_{a′}-X′X′X′-N_{b′}-Y′Y′Y′-N_{a′}-n_{q′}5′ (IIIc)
[0037] wherein each N_{b} and N_{b}′ independently represents an oligonucleotide sequence comprising 1-5 modified nucleotides.

[0038] In a further embodiment, formula (III) is represented by formula (IIId):

sense: 5′nₚ-Nₐ-XXX-N_{b}-YYY-N_{b}-ZZZ-Nₐ-n_{q}3′

antisense: 3′n_{p′}-N_{a′}-X′X′X′-N_{b′}-Y′Y′Y′-N_{b′}-Z′Z′Z′-N_{a′}-n_{q′}5′ (IIId)
[0039] wherein each N_{b} and N_{b}′ independently represents an oligonucleotide sequence comprising 1-5 modified nucleotides and each Nₐ and Nₐ′ independently represents an oligonucleotide sequence comprising 2-10 modified nucleotides.

[0040] In one embodiment, the double-stranded region is 15-30 nucleotide pairs in length. In another embodiment, the double-stranded region is 17-23 nucleotide pairs in length. In yet another embodiment, the double-stranded region is 17-25 nucleotide pairs in length. In a further embodiment, the double-stranded region is 23-27 nucleotide pairs in length. In another embodiment, the double-stranded region is 19-21 nucleotide pairs in length. In another embodiment, the double-stranded region is 19-23 nucleotide pairs in length. In another embodiment, the double-stranded region is 21-23 nucleotide pairs in length. In yet another embodiment, each strand has 15-30 nucleotides. In yet another embodiment, each strand has 19-30 nucleotides.

[0041] In one embodiment, the modifications on the nucleotides are selected from the group consisting of LNA, UNA, CRN, cEt, HNA, CeNA, 2′-methoxyethyl, 2′-O-alkyl, 2′-O-allyl, 2′-C-allyl, 2′-fluoro, 2′-deoxy, 2′-hydroxyl, and combinations thereof. In another embodiment, the modifications on the nucleotides are 2′-O-methyl or 2′-fluoro modifications.

[0042] In one embodiment, the ligand the ligand is one or more GalNAc derivatives attached through a bivalent or trivalent branched linker. In another embodiment, the ligand is

[chemical structure]

[0043] In one embodiment, the ligand is attached to the 3′ end of the sense strand.

[0044] In another embodiment, the RNAi agent is conjugated to the ligand as shown in the following schematic

[chemical structure]

wherein X is O or S. In a specific embodiment, X is O.

[0045] In one embodiment, the agent further comprises at least one phosphorothioate or methylphosphonate internucleotide linkage.

[0046] In a further embodiment, the phosphorothioate or methylphosphonate internucleotide linkage is at the 3′-terminus of one strand. In another embodiment, the strand is the antisense strand. In another embodiment, the strand is the sense strand.

[0047] In one embodiment, the phosphorothioate or methylphosphonate internucleotide linkage is at the 5′-terminus of one strand. In another embodiment, the strand is the antisense strand. In a further embodiment, the strand is the sense strand.

[0048] In one embodiment, the phosphorothioate or methylphosphonate internucleotide linkage is at the both the 5′- and 3′-terminus of one strand. In another embodiment, the strand is the antisense strand.

[0049] In another embodiment, the double-stranded RNAi agent comprises 6-8 phosphorothioate internucleotide linkages. In a further embodiment, the antisense strand comprises two phosphorothioate internucleotide linkages at the 5′-terminus and two phosphorothioate internucleotide linkages at the 3′-terminus, and the sense strand comprises at least two phosphorothioate internucleotide linkages at either the 5′-terminus or the 3′-terminus of the sense strand.

[0050] In one embodiment, the base pair at the 1 position of the 5′-end of the antisense strand of the duplex is an AU base pair. In another embodiment, the Y nucleotides contain a 2′-fluoro modification. In a further embodiment, the Y′ nucleotides contain a 2′-O-methyl modification.

[0051] In one embodiment, p′>0. In another embodiment, p′=2. In a further embodiment, q′=0, p=0, q=0, and p′ overhang nucleotides are complementary to the target mRNA. In yet a further embodiment, q′=0, p=0, q=0, and p′ overhang nucleotides are non-complementary to the target mRNA.

[0052] In one embodiment, the sense strand has a total of 21 nucleotides and the antisense strand has a total of 23 nucleotides.

[0053] In another embodiment, at least one nₚ′ is linked to a neighboring nucleotide via a phosphorothioate linkage. In a further embodiment, all nₚ′ are linked to neighboring nucleotides via phosphorothioate linkages.

[0054] In another embodiment, the RNAi agent is selected from the group of RNAi agents listed in any one of Tables 3, 4, 7, 8, 11, 13, and 15.

[0055] In one aspect, the present invention provides double-stranded ribonucleic acid (RNAi) agents for inhibiting expression of angiotensinogen (AGT). The double-stranded RNAi agents include a sense strand and an antisense strand forming a double-stranded region, wherein the sense strand comprises at least 15 contiguous nucleotides differing by no more than 3 nucleotides from the nucleotide sequence of SEQ ID NO:1 and the antisense strand comprises at least 15 contiguous nucleotides differing by no more than 3 nucleotides from the nucleotide sequence of SEQ ID NO:2, wherein substantially all of the nucleotides of the sense strand comprise a modification selected from the group consisting of a 2′-O-methyl modification and a 2′-fluoro modification wherein the sense strand comprises two phosphorothioate internucleotide linkages at the 5′-terminus, wherein substantially all of the nucleotides of the antisense strand comprise a modification selected from the group consisting of a 2′-O-methyl modification and a 2′-fluoro modification, wherein the antisense strand comprises two phosphorothioate internucleotide linkages at the 5′-terminus and two phosphorothioate internucleotide linkages at the 3′-terminus, and wherein the sense strand is conjugated to one or more GalNAc derivatives attached through a branched bivalent or trivalent linker at the 3′-terminus.

[0056] In one embodiment, all of the nucleotides of the sense strand and all of the nucleotides of the antisense strand comprise a modification.

[0057] In another aspect, the present invention provides RNAi agents, e.g., double-stranded ribonucleic acid (RNAi) agents capable of inhibiting the expression of AGT (angiotensinogen) in a cell, wherein the double-stranded RNAi agent comprises a sense strand complementary to an antisense strand, wherein the antisense strand comprises a region complementary to part of an mRNA encoding AGT, wherein each strand is about 14 to about 30 nucleotides in length, wherein the double-stranded RNAi agent is represented by formula (III):

sense: 5′nₚ-Nₐ-(XXX)ᵢ-N_{b}-YYY-N_{b}-(ZZZ)ⱼ-Nₐ-n_{q}3′

antisense: 3′nₚ′-Nₐ′-(X′X′X′)ₖ-N_{b}′-Y′Y′Y′-N_{b}′-(Z′Z′Z′)ₗ-Nₐ′-n_{q}′5′ (III)

[0058] wherein:

[0059] i, j, k, and l are each independently 0 or 1;

[0060] p, p′, q, and q′ are each independently 0-6;

[0061] each Nₐ and Nₐ′ independently represents an oligonucleotide sequence comprising 0-25 nucleotides which are either modified or unmodified or combinations thereof, each sequence comprising at least two differently modified nucleotides;

[0062] each N_{b} and N_{b}′ independently represents an oligonucleotide sequence comprising 0-10 nucleotides which are either modified or unmodified or combinations thereof;

[0063] each nₚ, nₚ′, n_{q}, and n_{q}′, each of which may or may not be present independently represents an overhang nucleotide;

[0064] XXX, YYY, ZZZ, X′X′X′, Y′Y′Y′, and Z′Z′Z′ each independently represent one motif of three identical modifications on three consecutive nucleotides, and wherein the modifications are 2′-O-methyl or 2′-fluoro modifications;

[0065] modifications on N_{b} differ from the modification on Y and modifications on N_{b}′ differ from the modification on Y′; and

[0066] wherein the sense strand is conjugated to at least one ligand.

[0067] In yet another aspect, the present invention provides RNAi agents, e.g., double-stranded ribonucleic acid (RNAi) agents capable of inhibiting the expression of angiotensinogen (AGT) in a cell, wherein the double-stranded RNAi agent comprises a sense strand complementary to an antisense strand, wherein the antisense strand comprises a region complementary to part of an mRNA encoding AGT, wherein each strand is about 14 to about 30 nucleotides in length, wherein the double-stranded RNAi agent is represented by formula (III):

sense: 5′nₚ-Nₐ-(XXX)ᵢ-N_{b}-YYY-N_{b}-(ZZZ)ⱼ-Nₐ-n_{q}3′

antisense: 3′nₚ′-Nₐ′-(X′X′X′)ₖ-N_{b}′-Y′Y′Y′-N_{b}′-(Z′Z′Z′)ₗ-Nₐ′-n_{q}′5′ (III)

[0068] wherein:

[0069] i, j, k, and l are each independently 0 or 1;

[0070] each nₚ, n_{q}, and n_{q}′, each of which may or may not be present, independently represents an overhang nucleotide;

[0071] p, q, and q′ are each independently 0-6;

[0072] nₚ′>0 and at least one nₚ′ is linked to a neighboring nucleotide via a phosphorothioate linkage;

[0073] each Nₐ and Nₐ′ independently represents an oligonucleotide sequence comprising 0-25 nucleotides which are either modified or unmodified or combinations thereof, each sequence comprising at least two differently modified nucleotides;

[0074] each N_{b} and N_{b}′ independently represents an oligonucleotide sequence comprising 0-10 nucleotides which are either modified or unmodified or combinations thereof;

[0075] XXX, YYY, ZZZ, X′X′X′, Y′Y′Y′, and Z′Z′Z′ each independently represent one motif of three identical modifications on three consecutive nucleotides, and wherein the modifications are 2′-O-methyl or 2′-fluoro modifications;

[0076] modifications on N_{b} differ from the modification on Y and modifications on N_{b}′ differ from the modification on Y′; and

[0077] wherein the sense strand is conjugated to at least one ligand.

[0078] In a further aspect, the present invention provides RNAi agents, e.g., double-stranded ribonucleic acid (RNAi agent) capable of inhibiting the expression of angiotensinogen (AGT) in a cell, wherein the double-stranded RNAi agent comprises a sense strand complementary to an antisense strand, wherein the antisense strand comprises a region complementary to part of an mRNA encoding AGT, wherein each strand is about 14 to about 30 nucleotides in length, wherein the double-stranded RNAi agent is represented by formula (III):

sense: 5′nₚ-Nₐ-(XXX)ᵢ-N_{b}-YYY-N_{b}-(ZZZ)ⱼ-Nₐ-n_{q}3′

antisense: 3′nₚ′-Nₐ′-(X′X′X′)ₖ-N_{b}′-Y′Y′Y′-N_{b}′-(Z′Z′Z′)ₗ-Nₐ′-n_{q}′5′ (III)

[0079] wherein:

[0080] i, j, k, and l are each independently 0 or 1;

[0081] each nₚ, n_{q}, and n_{q}′, each of which may or may not be present, independently represents an overhang nucleotide;

[0082] p, q, and q′ are each independently 0-6;

[0083] nₚ′>0 and at least one nₚ′ is linked to a neighboring nucleotide via a phosphorothioate linkage;

[0084] each Nₐ and Nₐ′ independently represents an oligonucleotide sequence comprising 0-25 nucleotides which are either modified or unmodified or combinations thereof, each sequence comprising at least two differently modified nucleotides;

[0085] each N_{b} and N_{b}′ independently represents an oligonucleotide sequence comprising 0-10 nucleotides which are either modified or unmodified or combinations thereof;

[0086] XXX, YYY, ZZZ, X′X′X′, Y′Y′Y′, and Z′Z′Z′ each independently represent one motif of three identical modifications on three consecutive nucleotides, and wherein the modifications are 2′-O-methyl or 2′-fluoro modifications;

[0087] modifications on N_{b} differ from the modification on Y and modifications on N_{b}′ differ from the modification on Y′; and

[0088] wherein the sense strand is conjugated to at least one ligand, wherein the ligand is one or more GalNAc derivatives attached through a bivalent or trivalent branched linker.

[0089] In another aspect, the present invention provides RNAi agents, e.g., double-stranded ribonucleic acid (RNAi) agents capable of inhibiting the expression of angiotensinogen (AGT) in a cell, wherein the double-stranded RNAi agent comprises a sense strand complementary to an antisense strand, wherein the antisense strand comprises a region complementary to part of an mRNA encoding AGT, wherein each strand is about 14 to about 30 nucleotides in length, wherein the double-stranded RNAi agent is represented by formula (III):

sense: 5′nₚ-Nₐ-(XXX)ᵢ-N_{b}-YYY-N_{b}-(ZZZ)ⱼ-Nₐ-n_{q}3′

antisense: 3′nₚ′-Nₐ′-(X′X′X′)ₖ-N_{b}′-Y′Y′Y′-N_{b}′-(Z′Z′Z′)ₗ-Nₐ′-n_{q}′5′ (III)

[0090] wherein:

[0091] i, j, k, and l are each independently 0 or 1;

[0092] each nₚ, n_{q}, and n_{q}′, each of which may or may not be present, independently represents an overhang nucleotide;

[0093] p, q, and q′ are each independently 0-6;

[0094] nₚ′>0 and at least one nₚ′ is linked to a neighboring nucleotide via a phosphorothioate linkage;

[0095] each Nₐ and Nₐ′ independently represents an oligonucleotide sequence comprising 0-25 nucleotides which are either modified or unmodified or combinations thereof, each sequence comprising at least two differently modified nucleotides;

[0096] each N_{b} and N_{b}′ independently represents an oligonucleotide sequence comprising 0-10 nucleotides which are either modified or unmodified or combinations thereof;

[0097] XXX, YYY, ZZZ, X′X′X′, Y′Y′Y′, and Z′Z′Z′ each independently represent one motif of three identical modifications on three consecutive nucleotides, and wherein the modifications are 2′-O-methyl or 2′-fluoro modifications;

[0098] modifications on N_{b} differ from the modification on Y and modifications on N_{b}′ differ from the modification on Y′;

[0099] wherein the sense strand comprises at least one phosphorothioate linkage; and

[0100] wherein the sense strand is conjugated to at least one ligand, wherein the ligand is one or more GalNAc derivatives attached through a bivalent or trivalent branched linker.

[0101] In yet another aspect, the present invention provides RNAi agents, e.g., double-stranded ribonucleic acid (RNAi) agent capable of inhibiting the expression of angiotensinogen (AGT) in a cell, wherein the double-stranded RNAi agent comprises a sense strand complementary to an antisense strand, wherein the antisense strand comprises a region complementary to part of an mRNA encoding AGT, wherein each strand is about 14 to about 30 nucleotides in length, wherein the double-stranded RNAi agent is represented by formula (III):

sense: 5′nₚ-Nₐ-YYY-Nₐ-n_{q}3′

antisense: 3′nₚ‘-Nₐ’-Y′Y′Y′-Nₐ′-n_{q}′5′ (IIIa)

[0102] wherein:

[0103] each nₚ, n_{q}, and n_{q}′, each of which may or may not be present, independently represents an overhang nucleotide;

[0104] p, q, and q′ are each independently 0-6;

[0105] nₚ′>0 and at least one nₚ′ is linked to a neighboring nucleotide via a phosphorothioate linkage;

[0106] each Nₐ and Nₐ′ independently represents an oligonucleotide sequence comprising 0-25 nucleotides which are either modified or unmodified or combinations thereof, each sequence comprising at least two differently modified nucleotides;

[0107] YYY and Y′Y′Y′ each independently represent one motif of three identical modifications on three consecutive nucleotides, and wherein the modifications are 2′-O-methyl or 2′-fluoro modifications;

[0108] wherein the sense strand comprises at least one phosphorothioate linkage; and

[0109] wherein the sense strand is conjugated to at least one ligand, wherein the ligand is one or more GalNAc derivatives attached through a bivalent or trivalent branched linker.

[0110] In another aspect, the present invention provides a double-stranded RNAi agent comprising the RNAi agents listed in any one of Tables 3, 4, 7, 8, 11, 13, and 15.

[0111] In another aspect, the present invention provides a composition comprising a modified antisense polynucleotide agent, wherein the agent is capable of inhibiting the expression of angiotensinogen (AGT) in a cell, and comprises a sequence complementary to a sense sequence selected from the group of the sequences listed in Tables 3, 4, 7, 8, 11, 13, and 15, wherein the polynucleotide is about 14 to about 30 nucleotides in length.

[0112] The present invention also provides cells, vectors, host cells and pharmaceutical compositions comprising the double-stranded RNAi agents of the invention.

[0113] In one embodiment, a cell contains the double-stranded RNAi agent.

[0114] In some embodiments, the double-stranded RNAi agent or the composition comprising a modified antisense polynucleotide agent is administered using a pharmaceutical composition.

[0115] In one embodiment, the pharmaceutical compositions of the invention comprise a lipid formulation, such as XTC or MC3.

[0116] In preferred embodiments, the double-stranded RNAi agent is administered in a solution. In some embodiments, the double-stranded RNAi agent is administered in an unbuffered solution. In another embodiment, the unbuffered solution is saline or water. In another embodiment, the double-stranded RNAi agent is administered with a buffer solution.

[0117] In yet another embodiment, the buffer solution comprises acetate, citrate, prolamine, carbonate, or phosphate or any combination thereof. In some embodiment, the buffer solution is phosphate buffered saline (PBS).

[0118] In another aspect, the present invention provides methods of inhibiting angiotensinogen (AGT) expression in a cell. The methods include contacting the cell with the double-stranded RNAi agent, a pharmaceutical composition, a composition comprising a modified antisense polynucleotide agent, or a vector comprising the RNAi agent and maintaining the cell produced for a time sufficient to obtain degradation of the mRNA transcript of a AGT gene, thereby inhibiting expression of the AGT gene in the cell.

[0119] In one embodiment, the cell is within a subject. In a further embodiment, the subject is a human. In a further embodiment, the subject suffers from an angiotensinogen-associated disease.

[0120] In one embodiment, the AGT expression is inhibited by at least about 30%, about 40%, about 50%, about 60%, about 70%, about 80%, about 90%, about 95%, about 98% or about 100%.

[0121] In one embodiment, the sense strand comprises at least 15 contiguous nucleotides differing by no more than 3 nucleotides from nucleotides 2801-2101; 803-843; 834-859; 803-859; 803-875; 834-875; 847-875; 1247-1271; 1566-1624; 1570-1624; 1584-1624; 1584-1624; 1584-1621; 2035-2144; 2070-2144; 2070-2103; 2201-2223; 2227-2360; 2227-2304; 2290-2318; 2304-2350; 2304-2326; 2320-2342; 2333-2360; 2333-2358; 485-503; 517-535; 560-578; 635-653; 803-821; 814-832; 822-840; 825-843; 834-852; 837-855; 841-859; 855-873; 967-985; 1247-1265; 1248-1266; 1249-1267; 1251-1269; 1253-1271; 1566-1584; 1570-1588; 1572-1590; 1574-1592; 1584-1602; 1587-1605; 1591-1609; 1592-1610; 1595-1613; 1601-1619; 1602-1620; 1605-1623; 1729-1747; 1738-1756; 1739-1757; 1741-1769; 1767-1785; 1810-1828; 1827-1845; 1880-1989; 1892-1914; 1894-1914; 1894-2012; 2035-2053; 2046-2064; 2057-2075; 2070-2088; 2072-2090; 2078-2096; 2078-2107; 2078-2011; 2080-2098; 2081-2099; 2081-2104; 2081-2011; 2082-2100; 2084-2102; 2084-2011; 2090-2108; 2100-2118; 2111-2129; 2124-2142; 2125-2143; 2167-2185; 2179-2197; 2201-2219; 2202-2220; 2203-2221; 2204-2222; 2227-2245; 2230-2248; 2234-2252; 2244-2264; 2255-2273; 2266-2284; 2268-2286; 2270-2288; 2279-2297; 2281-2299; 2283-2301; 2284-2302; 2285-2303; 2286-2304; 2288-2306; 2290-2308; 2291-2309; 2291-2311; 2291-2318; 2291-2315; 2292-2310; 2294-2312; 2296-2314; 2299-2317; 2304-2322; 2304-2329; 2306-2324; 2307-2325; 2309-2327; 2309-2329; 2309-2342; 2309-2350; 2309-2358; 2314-2332; 2316-2334; 2317-2335; 2320-2338; 2321-2339; 2323-2341; 2325-2343; 2326-2344; 2328-2346; 2329-2347; 2331-2349; 2333-2351; 2334-2352; 2335-2353; 2339-2357; 2340-2358; or 2341-2359 of the nucleotide sequence of SEQ ID NO:1.

[0122] In another aspect, the present invention provides methods of treating a subject having a angiotensinogen (AGT)-associated disorder, comprising administering to the subject a therapeutically effective amount of the double-stranded RNAi agent, a composition comprising a modified antisense polynucleotide agent, or a pharmaceutical composition comprising the double-stranded RNAi agent, thereby treating the subject.

[0123] In another aspect, the present invention provides methods of treating a subject having a angiotensinogen (AGT)-associated disorder which include subcutaneously administering to the subject a therapeutically effective amount of a double-stranded ribonucleic acid (RNAi agent), wherein the double-stranded RNAi agent comprises a sense strand and an antisense strand forming a double-stranded region, wherein the sense strand comprises at least 15 contiguous nucleotides differing by no more than 3 nucleotides from the nucleotide sequence of SEQ ID NO:1 and the antisense strand comprises at least 15 contiguous nucleotides differing by no more than 3 nucleotides from the nucleotide sequence of SEQ ID NO:2, wherein substantially all of the nucleotides of the antisense strand comprise a modification selected from the group consisting of a 2′-O-methyl modification and a 2′-fluoromodification, wherein the antisense strand comprises two phosphorothioate internucleotide linkages at the 5′-terminus and two phosphorothioate internucleotide linkages at the 3′-terminus, wherein substantially all of the nucleotides of the sense strand comprise a modification selected from the group consisting of a 2′-O-methyl modification and a 2′-fluoro modification, wherein the sense strand comprises two phosphorothioate internucleotide linkages at the 5′-terminus and, wherein the sense strand is conjugated to one or more GalNAc derivatives attached through a branched bivalent or trivalent linker at the 3′-terminus.

[0124] In one embodiment, all of the nucleotides of the sense strand and all of the nucleotides of the antisense strand comprise a modification.

[0125] In another aspect, the present invention provides methods of treating a subject having a angiotensinogen (AGT)-associated disorder which include administering to the subject a therapeutically effective amount of a double-stranded ribonucleic acid (RNAi agent), wherein the double-stranded RNAi agent comprises a sense strand and an antisense strand forming a double-stranded region, wherein the sense strand comprises at least 15 contiguous nucleotides differing by no more than 3 nucleotides from nucleotides 2801-2101; 803-843; 834-859; 803-859; 803-875; 834-875; 847-875; 1247-1271; 1566-1624; 1570-1624; 1584-1624; 1584-1624; 1584-1621; 2035-2144; 2070-2144; 2070-2103; 2201-2223; 2227-2360; 2227-2304; 2290-2318; 2304-2350; 2304-2326; 2320-2342; 2333-2360; 2333-2358; 485-503; 517-535; 560-578; 635-653; 803-821; 814-832; 822-840; 825-843; 834-852; 837-855; 841-859; 855-873; 967-985; 1247-1265; 1248-1266; 1249-1267; 1251-1269; 1253-1271; 1566-1584; 1570-1588; 1572-1590; 1574-1592; 1584-1602; 1587-1605; 1591-1609; 1592-1610; 1595-1613; 1601-1619; 1602-1620; 1605-1623; 1729-1747; 1738-1756; 1739-1757; 1741-1769; 1767-1785; 1810-1828; 1827-1845; 1880-1989; 1892-1914; 1894-1914; 1894-2012; 2035-2053; 2046-2064; 2057-2075; 2070-2088; 2072-2090; 2078-2096; 2078-2107; 2078-2011; 2080-2098; 2081-2099; 2081-2104; 2081-2011; 2082-2100; 2084-2102; 2084-2011; 2090-2108; 2100-2118; 2111-2129; 2124-2142; 2125-2143; 2167-2185; 2179-2197; 2201-2219; 2202-2220; 2203-2221; 2204-2222; 2227-2245; 2230-2248; 2234-2252; 2244-2264; 2255-2273; 2266-2284; 2268-2286; 2270-2288; 2279-2297; 2281-2299; 2283-2301; 2284-2302; 2285-2303; 2286-2304; 2288-2306; 2290-2308; 2291-2309; 2291-2311; 2291-2318; 2291-2315; 2292-2310; 2294-2312; 2296-2314; 2299-2317; 2304-2322; 2304-2329; 2306-2324; 2307-2325; 2309-2327; 2309-2329; 2309-2342; 2309-2350; 2309-2358; 2314-2332; 2316-2334; 2317-2335; 2320-2338; 2321-2339; 2323-2341; 2325-2343; 2326-2344; 2328-2346; 2329-2347; 2331-2349; 2333-2351; 2334-2352; 2335-2353; 2339-2357; 2340-2358; or 2341-2359 of the nucleotide sequence of SEQ ID NO:1 and the antisense strand comprises at least 15 contiguous nucleotides differing by no more than 3 nucleotides from the nucleotides at the corresponding position of the nucleotide sequence of SEQ ID NO:2 such that the antisense strand is substantially complementary to the at least 15 contiguous nucleotides in the sense strand. In certain embodiments, substantially all of the nucleotides of the sense strand are modified nucleotides. In other embodiments, substantially all of the nucleotides of the antisense strand are modified nucleotides. In yet other embodiments, substantially all of the nucleotides of both strands are modified nucleotides. In one embodiment, all of the nucleotides of the sense strand and all of the nucleotides of the antisense strand are modified nucleotides. In one embodiment, the sense strand is conjugated to a ligand attached at the 3′-terminus.

[0126] In another aspect, the present invention provides methods of treating a subject having a angiotensinogen (AGT)-associated disorder which include administering to the subject a therapeutically effective amount of a double-stranded ribonucleic acid (RNAi agent), wherein the double-stranded RNAi agent comprises a sense strand and an antisense strand forming a double-stranded region, wherein the sense strand comprises at least 15 contiguous nucleotides from nucleotides 803-843; 834-859; 803-859; 1247-1271; 1566-1624; 1570-1624; 1584-1624; 1584-1624; 1584-1621; 2035-2144; 2070-2144; 2070-2103; 2201-2223; 2227-2360; 2227-2304; 2290-2318; 2304-2350; 2304-2326; 2320-2342; 2333-2360; 2333-2358; 485-503; 517-535; 560-578; 635-653; 803-821; 814-832; 822-840; 825-843; 834-852; 837-855; 841-859; 855-873; 967-985; 1247-1265; 1248-1266; 1249-1267; 1251-1269; 1253-1271; 1566-1584; 1570-1588; 1572-1590; 1574-1592; 1584-1602; 1587-1605; 1591-1609; 1592-1610; 1595-1613; 1601-1619; 1602-1620; 1605-1623; 1729-1747; 1738-1756; 1739-1757; 1741-1769; 1767-1785; 1810-1828; 1827-1845; 1880-1989; 1894-2012; 2035-2053; 2046-2064; 2057-2075; 2070-2088; 2072-2090; 2078-2096; 2080-2098; 2081-2099; 2082-2100; 2084-2102; 2090-2108; 2100-2118; 2111-2129; 2124-2142; 2125-2143; 2167-2185; 2179-2197; 2201-2219; 2202-2220; 2203-2221; 2204-2222; 2227-2245; 2230-2248; 2234-2252; 2244-2264; 2255-2273; 2266-2284; 2268-2286; 2270-2288; 2279-2297; 2281-2299; 2283-2301; 2284-2302; 2285-2303; 2286-2304; 2288-2306; 2290-2308; 2291-2309; 2292-2310; 2294-2312; 2296-2314; 2299-2317; 2304-2322; 2306-2324; 2307-2325; 2309-2327; 2314-2332; 2316-2334; 2317-2335; 2320-2338; 2321-2339; 2323-2341; 2325-2343; 2326-2344; 2328-2346; 2329-2347; 2331-2349; 2333-2351; 2334-2352; 2335-2353; 2339-2357; 2340-2358; or 2341-2359 of the nucleotide sequence of SEQ ID NO:1 and the antisense strand comprises at least 15 contiguous nucleotides from the nucleotides at the corresponding position of the nucleotide sequence of SEQ ID NO:2 such that the antisense strand is substantially complementary to the at least 15 contiguous nucleotides in the sense strand. In certain embodiments, substantially all of the nucleotides of the sense strand are modified nucleotides. In other embodiments, substantially all of the nucleotides of the antisense strand are modified nucleotides. In yet other embodiments, substantially all of the nucleotides of both strands are modified nucleotides. In one embodiment, the sense strand is conjugated to a ligand attached at the 3′-terminus.

[0127] In one embodiment, the subject is a human.

[0128] In one embodiment, the angiotensinogen-associated disease is selected from the group consisting of hypertension, borderline hypertension, primary hypertension, secondary hypertension, hypertensive emergency, hypertensive urgency, isolated systolic or diastolic hypertension, pregnancy-associated hypertension, diabetic hypertension, resistant hypertension, refractory hypertension, paroxysmal hypertension, renovascular hypertension, Goldblatt hypertension, ocular hypertension, glaucoma, pulmonary hypertension, portal hypertension, systemic venous hypertension, systolic hypertension, labile hypertension; hypertensive heart disease, hypertensive nephropathy, atherosclerosis, arteriosclerosis, vasculopathy, diabetic nephropathy, diabetic retinopathy, chronic heart failure, cardiomyopathy, diabetic cardiac myopathy, glomerulosclerosis, coarctation of the aorta, aortic aneurism, ventricular fibrosis, Cushing's syndrome, and other glucocorticoid excess states including chronic steroid therapy, pheochromocytoma, reninoma, secondary aldosteronism and other mineralocorticoid excess states, sleep apnea, thyroid/parathyroid disease, heart failure, myocardial infarction, angina, stroke, diabetes mellitus, renal disease, renal failure, systemic sclerosis, intrauterine growth restriction (IUGR), and fetal growth restriction.

[0129] In another embodiment, the angiotensinogen-associated disease is selected from the group consisting of hypertension, hypertensive heart disease, hypertensive nephropathy, pregnancy-associated hypertension, atherosclerosis, arteriosclerosis, chronic kidney disease, glomerulosclerosis, coarctation of the aorta, aortic aneurism, ventricular fibrosis, Cushing's syndrome, and other glucocorticoid excess states including chronic steroid therapy, pheochromocytoma, primary aldosteronism and other mineralocorticoid excess states, sleep apnea, thyroid/parathyroid disease, heart failure, myocardial infarction, stroke, diabetes mellitus, renal failure, and systemic sclerosis.

[0130] In one embodiment, the angiotensinogen-associated disease is pregnancy-associated hypertension (e.g., pregnancy-induced hypertension, preeclampsia, and eclampsia) and administration of an iRNA of the invention to a subject results in a decrease in maternal blood pressure; a decrease in maternal albuminuria; an increase in uteroplacental unit weight; an increase in fetal weight; normalization of the fetal brain:liver ratio; a decrease in AGT mRNA expression in the maternal liver and no significant decrease in hAGT mRNA expression in the placenta; an increase in overall placenta size; an increase in the size of the villous placenta; no significant change in the size of the trophospongium of the placenta; a reduction in the ratio of sFLT1:PLGF mRNA expression in the maternal kidney; a reduction in the ratio of serum sFLT1:PLGF levels; and/or a decrease in the level of agonistic autoantibodies to AT1.

[0131] In one embodiment, the double-stranded RNAi agent is administered at a dose of about 0.01 mg/kg to about 10 mg/kg or about 0.5 mg/kg to about 50 mg/kg. In a preferred embodiment, the double-stranded RNAi agent is administered at a dose of about 10 mg/kg, about 30 mg/kg, or about 3.0 mg/kg. In one embodiment, the double-stranded RNAi agent is administered at a dose of about 10 mg/kg. In one embodiment, the double-stranded RNAi agent is administered at a dose of about 0.5 mg/kg twice per week. In another embodiment, the double-stranded RNAi agent is administered at a dose of about 10 mg/kg every other week. In another embodiment, the double-stranded RNAi agent is administered at a dose of about 0.5-1.0 mg/kg once per week. In another embodiment, the RNAi agent is administered about once per week, once per month, once every other two months, or once a quarter (i.e., once every three months) at a dose of about 0.1 mg/kg to about 5.0 mg/kg.

[0132] In one embodiment, the double-stranded RNAi agent is administered subcutaneously or intravenously.

[0133] In one embodiment, the RNAi agent is administered in two or more doses.

[0134] In one embodiment, the RNAi agent is administered at intervals selected from the group consisting of once every about 12 hours, once every about 24 hours, once every about 48 hours, once every about 72 hours, and once every about 96 hours.

[0135] In one embodiment, the RNAi agent is administered twice per week.

[0136] In one embodiment, the RNAi agent is administered every other week.

[0137] In certain embodiments, the RNAi agent is administered once per month.

[0138] In certain embodiments, the RNAi agent is administered once every other month.

[0139] In certain embodiments, the RNAi agent is administered once per quarter (i.e., every three months).

[0140] In yet another embodiment, the methods further comprise administering to the subject, an additional therapeutic agent. In some embodiments, the additional therapeutic agent is selected from the group consisting of a diuretic, an angiotensin converting enzyme (ACE) inhibitor, an angiotensin II receptor antagonist, a beta-blocker, a vasodialator, a calcium channel blocker, an aldosterone antagonist, an alpha₂-agonist, a renin inhibitor, an alpha-blocker, a peripheral acting adrenergic agent, a selective D1 receptor partial agonist, a nonselective alpha-adrenergic antagonist, a synthetic, steroidal antimineralocorticoid agent, or a combination of any of the foregoing, and a hypertension therapeutic agent formulated as a combination of agents.

### BRIEF DESCRIPTION OF THE DRAWINGS

[0141] FIG. 1 is a schematic of the renin-angiotensin-aldosterone system (RAAS) including an indication of the various points in the system which have been the targets for therapeutic intervention (from Zaman, et al. (2002) Nat Rev Drug Disc 1:621).

[0142] FIG. 2A is a graph depicting the reduction in mean arterial blood pressure in pregnant transgenic rats following administration of AD-60771.

[0143] FIG. 2B is a graph depicting reduction of serum albumin in pregnant transgenic rats following administration of AD-60771.

[0144] FIG. 3A is a graph depicting increased uteroplacental unit weight following maternal administration of AD-60771 demonstrating the improvement of fetal outcome following maternal administration of AD-60771.

[0145] FIG. 3B is a graph depicting increased fetal weight following maternal administration of AD-60771 demonstrating the improvement of fetal outcome following maternal administration of AD-60771.

[0146] FIG. 3C is a graph depicting a normalized fetal brain:liver ratio following maternal administration of AD-60771 demonstrating the improvement of fetal outcome following maternal administration of AD-60771.

[0147] FIG. 4A is a graph depicting reduction of hAGT mRNA in the maternal liver following administration of AD-60771 demonstrating that the iRNA does not enter the placental barrier.

[0148] FIG. 4B is a graph depicting that there is no significant reduction of hAGT mRNA in the placenta demonstrating that the iRNA does not enter the placental barrier.

[0149] FIG. 5 is a graph depicting the tissue exposure of the maternal liver, placenta and fetal liver to AD-60771.

[0150] FIG. 6A is a placental section from a pregnant wild-type rat immunohistochemically stained for cytokeratin.

[0151] FIG. 6B is a placental section from an untreated pregnant PE rat immunohistochemically stained for cytokeratin.

[0152] FIG. 6C is a placental section from a pregnant PE rat administered AD-60771 immunohistochemically stained for cytokeratin.

[0153] FIG. 6D is a graph depicting the size of the mesometrial triangle of a pregnant PE rat administered AD-60771 and an untreated pregnant PE rat.

[0154] FIG. 6E is a graph depicting the size of the trophospongium of a pregnant PE rat administered AD-60771 and an untreated pregnant PE rat.

[0155] FIG. 6F is a graph depicting the size of the placenta of a pregnant PE rat administered AD-60771 and an untreated pregnant PE rat.

[0156] FIG. 6G is a graph depicting the size of the labyrinth of a pregnant PE rats administered AD-60771 and an untreated pregnant PE rat.

[0157] FIG. 7A is a graph depicting a reduction in the amount of mRNA of the anti-angiogenic factor sFLT1 in the maternal kidney following administration of AD-60771.

[0158] FIG. 7B is a graph depicting a reduction in the amount of mRNA of the angiogenic factor PLGF in the maternal kidney following administration of AD-60771.

[0159] FIG. 7C is a graph depicting a reduction in the amount of mRNA of the anti-angiogenic factor sFLT1 in the placenta following maternal administration of AD-60771.

[0160] FIG. 7D is a graph depicting a reduction in the amount of mRNA of the angiogenic factor PLGF in the placenta following maternal administration of AD-60771.

[0161] FIG. 8 is a graph depicting the reduction in AT1-AA levels in PE rats administered AD-60771 as assessed by the impact of AT1-AA isolated from control PE rats and pregnant PE rats on the spontaneous beating rate of neonatal rat cardiomyocytes.

[0162] FIG. 9A is a graph depicting the reduction in serum Angiotensin II (Ang 2-10) levels in pregnant PE rats administered AD-60771 as compared to non-pregnant PE rats and as compared to pregnant control Sprague-Dawley rats.

[0163] FIG. 9B is a graph depicting the reduction in serum human AGT (hAGT) and rat AGT (rAGT) levels in pregnant PE rats administered AD-60771 as compared to non-pregnant PE rats and as compared to pregnant control Sprague-Dawley rats.

### DETAILED DESCRIPTION OF THE INVENTION

[0164] The present invention provides iRNA compositions, which effect the RNA-induced silencing complex (RISC)-mediated cleavage of RNA transcripts of an angiotensinogen (AGT) gene. The gene may be within a cell, e.g., a cell within a subject, such as a human.

[0165] The present invention also provides methods for treating a subject having a disorder that would benefit from inhibiting or reducing the expression of an AGT gene, e.g., an angiotensinogen-associated disease, such as hypertension or pregnancy-associated hypertension, using iRNA compositions which effect the RNA-induced silencing complex (RISC)-mediated cleavage of RNA transcripts of an AGT gene.

[0166] The iRNAs of the invention include an RNA strand (the antisense strand) having a region which is about 30 nucleotides or less in length, e.g., 15-30, 15-29, 15-28, 15-27, 15-26, 15-25, 15-24, 15-23, 15-22, 15-21, 15-20, 15-19, 15-18, 15-17, 18-30, 18-29, 18-28, 18-27, 18-26, 18-25, 18-24, 18-23, 18-22, 18-21, 18-20, 19-30, 19-29, 19-28, 19-27, 19-26, 19-25, 19-24, 19-23, 19-22, 19-21, 19-20, 20-30, 20-29, 20-28, 20-27, 20-26, 20-25, 20-24, 20-23, 20-22, 20-21, 21-30, 21-29, 21-28, 21-27, 21-26, 21-25, 21-24, 21-23, or 21-22 nucleotides in length, which region is substantially complementary to at least part of an mRNA transcript of an AGT gene. In certain embodiments, the iRNAs of the invention include an RNA strand (the antisense strand) which can include longer lengths, for example up to 66 nucleotides, e.g., 36-66, 26-36, 25-36, 31-60, 22-43, 27-53 nucleotides in length with a region of at least 19 contiguous nucleotides that is substantially complementary to at least a part of an mRNA transcript of an AGT gene. These iRNAs with the longer length antisense strands include a second RNA strand (the sense strand) of 20-60 nucleotides in length wherein the sense and antisense strands form a duplex of 18-30 contiguous nucleotides. The use of these iRNAs enables the targeted degradation of mRNAs of the correponding gene (AGT gene) in mammals. Very low dosages of the iRNAs of the invention, in particular, can specifically and efficiently mediate RNA interference (RNAi), resulting in significant inhibition of expression of the correponding gene (AGT gene). Using in vitro and in vivo assays, the present inventors have demonstrated that iRNAs targeting an angiotensinogen gene can mediate RNAi, resulting in significant inhibition of expression of AGT, as well as reducing the symptoms associated with an angiotensinogen-associated disease, such as pregnancy-associated hypertension (e.g., pregnancy-induced hypertension, preeclampsia, and eclampsia). Thus, methods and compositions including these iRNAs are useful for treating a subject having an angiotensinogen-associated disease, such as hypertension.

[0167] The following detailed description discloses how to make and use compositions containing iRNAs to inhibit the expression of an angiotensinogen gene as well as compositions, uses, and methods for treating subjects having diseases and disorders that would benefit from inhibition and/or reduction of the expression of AGT.

### I. Definitions

[0168] In order that the present invention may be more readily understood, certain terms are first defined. In addition, it should be noted that whenever a value or range of values of a parameter are recited, it is intended that values and ranges intermediate to the recited values are also intended to be part of this invention.

[0169] The articles “a” and “an” are used herein to refer to one or to more than one (i.e., to at least one) of the grammatical object of the article. By way of example, “an element” means one element or more than one element, e.g., a plurality of elements.

[0170] The term “including” is used herein to mean, and is used interchangeably with, the phrase “including but not limited to”.

[0171] The term “or” is used herein to mean, and is used interchangeably with, the term “and/or,” unless context clearly indicates otherwise.

[0172] The term “about” is used herein to mean within the typical ranges of tolerances in the art. As used herein, “angiotensinogen,” used interchangeably with the term “AGT” refers to the well-known gene and polypeptide, also known in the art as Serpin Peptidase Inhibitor, Clade A, Member 8; Alpha-1 Antiproteinase; Antitrypsin; SERPINA8; Angiotensin I; Serpin A8; Angiotensin II; Alpha-1 Antiproteinase angiotensinogen; antitrypsin; pre-angiotensinogen2; ANHU; Serine Proteinase Inhibitor; and Cysteine Proteinase Inhibitor.

[0173] The term “AGT” includes human AGT, the amino acid and complete coding sequence of which may be found in for example, GenBank Accession No. GI:188595658 (NM_000029.3; SEQ ID NO:1); Macaca fascicularis AGT, the amino acid and complete coding sequence of which may be found in for example, GenBank Accession No. GI: 90075391 (AB170313.1: SEQ ID NO:3); mouse (Mus musculus) AGT, the amino acid and complete coding sequence of which may be found in for example, GenBank Accession No. GI: 113461997 (NM_007428.3; SEQ ID NO:5); and rat AGT (Rattus norvegicus) AGT the amino acid and complete coding sequence of which may be found in for example, for example GenBank Accession No. GI:51036672 (NM_134432; SEQ ID NO:7).

[0174] Additional examples of AGT mRNA sequences are readily available using publicly available databases, e.g., GenBank, UniProt, OMIM, and the Macaca genome project web site.

[0175] The term “AGT,” as used herein, also refers to naturally occurring DNA sequence variations of the AGT gene, such as a single nucleotide polymorphism (SNP) in the AGT gene. Exemplary SNPs may be found in the dbSNP database available at www.ncbi.nlm.nih.gov/projects/SNP/snp_ref.cgi?geneId=183. Non-limiting examples of sequence variations within the AGT gene include, for example, those described in U.S. Pat. No. 5,589,584, the entire contents of which are incorporated herein by reference. For example, sequence variations within the AGT gene may include as a C→T at position −532 (relative to the transcription start site); a G→A at position −386; a G→A at position −218; a C→T at position −18; a G→A and a A→C at position −6 and −10; a C→T at position+10 (untanslated); a C→T at position+521 (T174M); a T→C at position+597 (P199P); a T→C at position+704 (M235T; also see, e.g., Reference SNP (refSNP) Cluster Report: rs699, available at www.ncbi.nlm.nih.gov/SNP); a A→G at position+743 (Y248C); a C→T at position+813 (N271N); a G→A at position+1017 (L339L); a C→A at position+1075 (L359M); and/or a G→A at position+1162 (V388M).

[0176] As used herein, “target sequence” refers to a contiguous portion of the nucleotide sequence of an mRNA molecule formed during the transcription of an AGT gene, including mRNA that is a product of RNA processing of a primary transcription product. In one embodiment, the target portion of the sequence will be at least long enough to serve as a substrate for iRNA-directed cleavage at or near that portion of the nucleotide sequence of an mRNA molecule formed during the transcription of an AGT gene.

[0177] The target sequence may be from about 9-36 nucleotides in length, e.g., about 15-30 nucleotides in length. For example, the target sequence can be from about 15-30 nucleotides, 15-29, 15-28, 15-27, 15-26, 15-25, 15-24, 15-23, 15-22, 15-21, 15-20, 15-19, 15-18, 15-17, 18-30, 18-29, 18-28, 18-27, 18-26, 18-25, 18-24, 18-23, 18-22, 18-21, 18-20, 19-30, 19-29, 19-28, 19-27, 19-26, 19-25, 19-24, 19-23, 19-22, 19-21, 19-20, 20-30, 20-29, 20-28, 20-27, 20-26, 20-25, 20-24,20-23, 20-22, 20-21, 21-30, 21-29, 21-28, 21-27, 21-26, 21-25, 21-24, 21-23, or 21-22 nucleotides in length. Ranges and lengths intermediate to the above recited ranges and lengths are also contemplated to be part of the invention.

[0178] As used herein, the term “strand comprising a sequence” refers to an oligonucleotide comprising a chain of nucleotides that is described by the sequence referred to using the standard nucleotide nomenclature.

[0179] “G,” “C,” “A,” “T” and “U” each generally stand for a nucleotide that contains guanine, cytosine, adenine, thymidine and uracil as a base, respectively. However, it will be understood that the term “ribonucleotide” or “nucleotide” can also refer to a modified nucleotide, as further detailed below, or a surrogate replacement moiety (see, e.g., Table 2). The skilled person is well aware that guanine, cytosine, adenine, and uracil can be replaced by other moieties without substantially altering the base pairing properties of an oligonucleotide comprising a nucleotide bearing such replacement moiety. For example, without limitation, a nucleotide comprising inosine as its base can base pair with nucleotides containing adenine, cytosine, or uracil. Hence, nucleotides containing uracil, guanine, or adenine can be replaced in the nucleotide sequences of dsRNA featured in the invention by a nucleotide containing, for example, inosine. In another example, adenine and cytosine anywhere in the oligonucleotide can be replaced with guanine and uracil, respectively to form G-U Wobble base pairing with the target mRNA. Sequences containing such replacement moieties are suitable for the compositions and methods featured in the invention.

[0180] The terms “iRNA”, “RNAi agent,” “iRNA agent,”, “RNA interference agent” as used interchangeably herein, refer to an agent that contains RNA as that term is defined herein, and which mediates the targeted cleavage of an RNA transcript via an RNA-induced silencing complex (RISC) pathway. iRNA directs the sequence-specific degradation of mRNA through a process known as RNA interference (RNAi). The iRNA modulates, e.g., inhibits, the expression of AGT in a cell, e.g., a cell within a subject, such as a mammalian subject.

[0181] In one embodiment, an RNAi agent of the invention includes a single stranded RNA that interacts with a target RNA sequence, e.g., an AGT target mRNA sequence, to direct the cleavage of the target RNA. Without wishing to be bound by theory it is believed that long double-stranded RNA introduced into cells is broken down into siRNA by a Type III endonuclease known as Dicer (Sharp et al. (2001) Genes Dev. 15:485). Dicer, a ribonuclease-III-like enzyme, processes the dsRNA into 19-23 base pair short interfering RNAs with characteristic two base 3′ overhangs (Bernstein, et al., (2001) Nature 409:363). The siRNAs are then incorporated into an RNA-induced silencing complex (RISC) where one or more helicases unwind the siRNA duplex, enabling the complementary antisense strand to guide target recognition (Nykanen, et al., (2001) Cell 107:309). Upon binding to the appropriate target mRNA, one or more endonucleases within the RISC cleave the target to induce silencing (Elbashir, et al., (2001) Genes Dev. 15:188). Thus, in one aspect the invention relates to a single stranded RNA (siRNA) generated within a cell and which promotes the formation of a RISC complex to effect silencing of the target gene, i.e., an AGT gene. Accordingly, the term “siRNA” is also used herein to refer to an RNAi as described above.

[0182] In certain embodiments, the RNAi agent may be a single-stranded siRNA (ssRNAi) that is introduced into a cell or organism to inhibit a target mRNA. Single-stranded RNAi agents bind to the RISC endonuclease, Argonaute 2, which then cleaves the target mRNA. The single-stranded siRNAs are generally 15-30 nucleotides and are chemically modified. The design and testing of single-stranded siRNAs are described in U.S. Pat. No. 8,101,348 and in Lima et al., (2012) Cell 150:883-894, the entire contents of each of which are hereby incorporated herein by reference. Any of the antisense nucleotide sequences described herein may be used as a single-stranded siRNA as described herein or as chemically modified by the methods described in Lima et al., (2012) Cell 150:883-894.

[0183] In another embodiment, an “iRNA” for use in the compositions, uses, and methods of the invention is a double-stranded RNA and is referred to herein as a “double-stranded RNAi agent,” “double-stranded RNA (dsRNA) molecule,” “dsRNA agent,” or “dsRNA”. The term “dsRNA”, refers to a complex of ribonucleic acid molecules, having a duplex structure comprising two anti-parallel and substantially complementary nucleic acid strands, referred to as having “sense” and “antisense” orientations with respect to a target RNA, i.e., an AGT gene. In some embodiments of the invention, a double-stranded RNA (dsRNA) triggers the degradation of a target RNA, e.g., an mRNA, through a post-transcriptional gene-silencing mechanism referred to herein as RNA interference or RNAi.

[0184] In general, the majority of nucleotides of each strand of a dsRNA molecule are ribonucleotides, but as described in detail herein, each or both strands can also include one or more non-ribonucleotides, e.g., a deoxyribonucleotide and/or a modified nucleotide. In addition, as used in this specification, an “RNAi agent” may include ribonucleotides with chemical modifications; an RNAi agent may include substantial modifications at multiple nucleotides. As used herein, the term “modified nucleotide” refers to a nucleotide having, independently, a modified sugar moiety, a modified internucleotide linkage, and/or a modified nucleobase. Thus, the term modified nucleotide encompasses substitutions, additions or removal of, e.g., a functional group or atom, to internucleoside linkages, sugar moieties, or nucleobases. The modifications suitable for use in the agents of the invention include all types of modifications disclosed herein or known in the art. Any such modifications, as used in a siRNA type molecule, are encompassed by “RNAi agent” for the purposes of this specification and claims.

[0185] The majority of nucleotides of each strand of a dsRNA molecule may be ribonucleotides, but as described in detail herein, each or both strands can also include one or more non-ribonucleotides, e.g., a deoxyribonucleotide and/or a modified nucleotide. In addition, as used in this specification, an “RNAi agent” may include ribonucleotides with chemical modifications; an RNAi agent may include substantial modifications at multiple nucleotides. As used herein, the term “modified nucleotide” refers to a nucleotide having, independently, a modified sugar moiety, a modified internucleotide linkage, and/or modified nucleobase. Thus, the term modified nucleotide encompasses substitutions, additions or removal of, e.g., a functional group or atom, to internucleoside linkages, sugar moieties, or nucleobases. The modifications suitable for use in the agents of the invention include all types of modifications disclosed herein or known in the art. Any such modifications, as used in a siRNA type molecule, are encompassed by “RNAi agent” for the purposes of this specification and claims.

[0186] The duplex region may be of any length that permits specific degradation of a desired target RNA through a RISC pathway, and may range from about 9 to 36 base pairs in length, e.g., about 15-30 base pairs in length, for example, about 9, 10, 11, 12, 13, 14, 15, 16, 17, 18, 19, 20, 21, 22, 23, 24, 25, 26, 27, 28, 29, 30, 31, 32, 33, 34, 35, or 36 base pairs in length, such as about 15-30, 15-29, 15-28, 15-27, 15-26, 15-25, 15-24, 15-23, 15-22, 15-21, 15-20, 15-19, 15-18, 15-17, 18-30, 18-29, 18-28, 18-27, 18-26, 18-25, 18-24, 18-23, 18-22, 18-21, 18-20, 19-30, 19-29, 19-28, 19-27, 19-26, 19-25, 19-24, 19-23, 19-22, 19-21, 19-20, 20-30, 20-29, 20-28, 20-27, 20-26, 20-25, 20-24,20-23, 20-22, 20-21, 21-30, 21-29, 21-28, 21-27, 21-26, 21-25, 21-24, 21-23, or 21-22 base pairs in length. Ranges and lengths intermediate to the above recited ranges and lengths are also contemplated to be part of the invention.

[0187] The two strands forming the duplex structure may be different portions of one larger RNA molecule, or they may be separate RNA molecules. Where the two strands are part of one larger molecule, and therefore are connected by an uninterrupted chain of nucleotides between the 3′-end of one strand and the 5′-end of the respective other strand forming the duplex structure, the connecting RNA chain is referred to as a “hairpin loop.” A hairpin loop can comprise at least one unpaired nucleotide. In some embodiments, the hairpin loop can comprise at least 2, at least 3, at least 4, at least 5, at least 6, at least 7, at least 8, at least 9, at least 10, at least 20, at least 23 or more unpaired nucleotides.

[0188] Where the two substantially complementary strands of a dsRNA are comprised by separate RNA molecules, those molecules need not, but can be covalently connected. Where the two strands are connected covalently by means other than an uninterrupted chain of nucleotides between the 3′-end of one strand and the 5′-end of the respective other strand forming the duplex structure, the connecting structure is referred to as a “linker.” The RNA strands may have the same or a different number of nucleotides. The maximum number of base pairs is the number of nucleotides in the shortest strand of the dsRNA minus any overhangs that are present in the duplex. In addition to the duplex structure, an RNAi may comprise one or more nucleotide overhangs.

[0189] In certain embodiments, an RNAi agent of the invention is a dsRNA, each strand of which comprises 19-23 nucleotides, that interacts with a target RNA sequence, e.g., an AGT gene, without wishing to be bound by theory, long double-stranded RNA introduced into cells is broken down into siRNA by a Type III endonuclease known as Dicer (Sharp et al. (2001) Genes Dev. 15:485). Dicer, a ribonuclease-III-like enzyme, processes the dsRNA into 19-23 base pair short interfering RNAs with characteristic two base 3′ overhangs (Bernstein, et al., (2001) Nature 409:363). The siRNAs are then incorporated into an RNA-induced silencing complex (RISC) where one or more helicases unwind the siRNA duplex, enabling the complementary antisense strand to guide target recognition (Nykanen, et al., (2001) Cell 107:309). Upon binding to the appropriate target mRNA, one or more endonucleases within the RISC cleave the target to induce silencing (Elbashir, et al., (2001) Genes Dev. 15:188).

[0190] In one embodiment, an RNAi agent of the invention is a dsRNA of 24-30 nucleotides that interacts with a target RNA sequence, e.g., an AGT target mRNA sequence, to direct the cleavage of the target RNA. Without wishing to be bound by theory, long double-stranded RNA introduced into cells is broken down into siRNA by a Type III endonuclease known as Dicer (Sharp et al. (2001) Genes Dev. 15:485). Dicer, a ribonuclease-III-like enzyme, processes the dsRNA into 19-23 base pair short interfering RNAs with characteristic two base 3′ overhangs (Bernstein, et al., (2001) Nature 409:363). The siRNAs are then incorporated into an RNA-induced silencing complex (RISC) where one or more helicases unwind the siRNA duplex, enabling the complementary antisense strand to guide target recognition (Nykanen, et al., (2001) Cell 107:309). Upon binding to the appropriate target mRNA, one or more endonucleases within the RISC cleave the target to induce silencing (Elbashir, et al., (2001) Genes Dev. 15:188).

[0191] As used herein, the term “nucleotide overhang” refers to at least one unpaired nucleotide that protrudes from the duplex structure of an iRNA, e.g., a dsRNA. For example, when a 3′-end of one strand of a dsRNA extends beyond the 5′-end of the other strand, or vice versa, there is a nucleotide overhang. A dsRNA can comprise an overhang of at least one nucleotide; alternatively the overhang can comprise at least two nucleotides, at least three nucleotides, at least four nucleotides, at least five nucleotides or more. A nucleotide overhang can comprise or consist of a nucleotide/nucleoside analog, including a deoxynucleotide/nucleoside. The overhang(s) can be on the sense strand, the antisense strand or any combination thereof. Furthermore, the nucleotide(s) of an overhang can be present on the 5′-end, 3′-end or both ends of either an antisense or sense strand of a dsRNA.

[0192] In one embodiment, the antisense strand of a dsRNA has a 1-10 nucleotide, e.g., a 1, 2, 3, 4, 5, 6, 7, 8, 9, or 10 nucleotide, overhang at the 3′-end and/or the 5′-end. In one embodiment, the sense strand of a dsRNA has a 1-10 nucleotide, e.g., a 1, 2, 3, 4, 5, 6, 7, 8, 9, or 10 nucleotide, overhang at the 3′-end and/or the 5′-end. In certain embodiments, the overhang on the sense strand or the antisense strand, or both, can include extended lengths longer than 10 nucleotides, e.g., 1-30 nucleotides, 2-30 nucleotides, 10-30 nucleotides, or 10-15 nucleotides in length. In certain embodiments, an extended overhang is on the sense strand of the duplex. In certain embodiments, an extended overhang is present on the 3′end of the sense strand of the duplex. In certain embodiments, an extended overhang is present on the 5′end of the sense strand of the duplex. In certain embodiments, an extended overhang is on the antisense strand of the duplex. In certain embodiments, an extended overhang is present on the 3′end of the antisense strand of the duplex. In certain embodiments, an extended overhang is present on the 5′end of the antisense strand of the duplex. In certain embodiments, one or more of the nucleotides in the overhang is replaced with a nucleoside thiophosphate.

[0193] “Blunt” or “blunt end” means that there are no unpaired nucleotides at that end of the double-stranded RNAi agent, i.e., no nucleotide overhang. A “blunt ended” RNAi agent is a dsRNA that is double-stranded over its entire length, i.e., no nucleotide overhang at either end of the molecule. The RNAi agents of the invention include RNAi agents with nucleotide overhangs at one end (i.e., agents with one overhang and one blunt end) or with nucleotide overhangs at both ends.

[0194] The term “antisense strand” or “guide strand” refers to the strand of an iRNA, e.g., a dsRNA, which includes a region that is substantially complementary to a target sequence, e.g., a AGT mRNA. As used herein, the term “region of complementarity” refers to the region on the antisense strand that is substantially complementary to a sequence, for example a target sequence, e.g., an AGT nucleotide sequence, as defined herein. Where the region of complementarity is not fully complementary to the target sequence, the mismatches can be in the internal or terminal regions of the molecule. Generally, the most tolerated mismatches are in the terminal regions, e.g., within 5, 4, 3, or 2 nucleotides of the 5′- and/or 3′-terminus of the iRNA.

[0195] The term “sense strand,” or “passenger strand” as used herein, refers to the strand of an iRNA that includes a region that is substantially complementary to a region of the antisense strand as that term is defined herein.

[0196] As used herein, the term “cleavage region” refers to a region that is located immediately adjacent to the cleavage site. The cleavage site is the site on the target at which cleavage occurs. In some embodiments, the cleavage region comprises three bases on either end of, and immediately adjacent to, the cleavage site. In some embodiments, the cleavage region comprises two bases on either end of, and immediately adjacent to, the cleavage site. In some embodiments, the cleavage site specifically occurs at the site bound by nucleotides 10 and 11 of the antisense strand, and the cleavage region comprises nucleotides 11, 12, and 13.

[0197] As used herein, and unless otherwise indicated, the term “complementary,” when used to describe a first nucleotide sequence in relation to a second nucleotide sequence, refers to the ability of an oligonucleotide or polynucleotide comprising the first nucleotide sequence to hybridize and form a duplex structure under certain conditions with an oligonucleotide or polynucleotide comprising the second nucleotide sequence, as will be understood by the skilled person. Such conditions can, for example, be stringent conditions, where stringent conditions can include: 400 mM NaCl, 40 mM PIPES pH 6.4, 1 mM EDTA, 50° C. or 70° C. for 12-16 hours followed by washing (see, e.g., “Molecular Cloning: A Laboratory Manual, Sambrook, et al. (1989) Cold Spring Harbor Laboratory Press). Other conditions, such as physiologically relevant conditions as can be encountered inside an organism, can apply. The skilled person will be able to determine the set of conditions most appropriate for a test of complementarity of two sequences in accordance with the ultimate application of the hybridized nucleotides.

[0198] Complementary sequences within an iRNA, e.g., within a dsRNA as described herein, include base-pairing of the oligonucleotide or polynucleotide comprising a first nucleotide sequence to an oligonucleotide or polynucleotide comprising a second nucleotide sequence over the entire length of one or both nucleotide sequences. Such sequences can be referred to as “fully complementary” with respect to each other herein. However, where a first sequence is referred to as “substantially complementary” with respect to a second sequence herein, the two sequences can be fully complementary, or they can form one or more, but generally not more than 5, 4, 3 or 2 mismatched base pairs upon hybridization for a duplex up to 30 base pairs, while retaining the ability to hybridize under the conditions most relevant to their ultimate application, e.g., inhibition of gene expression via a RISC pathway. However, where two oligonucleotides are designed to form, upon hybridization, one or more single stranded overhangs, such overhangs shall not be regarded as mismatches with regard to the determination of complementarity. For example, a dsRNA comprising one oligonucleotide 21 nucleotides in length and another oligonucleotide 23 nucleotides in length, wherein the longer oligonucleotide comprises a sequence of 21 nucleotides that is fully complementary to the shorter oligonucleotide, can yet be referred to as “fully complementary” for the purposes described herein.

[0199] “Complementary” sequences, as used herein, can also include, or be formed entirely from, non-Watson-Crick base pairs and/or base pairs formed from non-natural and modified nucleotides, in so far as the above requirements with respect to their ability to hybridize are fulfilled. Such non-Watson-Crick base pairs include, but are not limited to, G:U Wobble or Hoogstein base pairing.

[0200] The terms “complementary,” “fully complementary” and “substantially complementary” herein can be used with respect to the base matching between the sense strand and the antisense strand of a dsRNA, or between the antisense strand of an iRNA agent and a target sequence, as will be understood from the context of their use.

[0201] As used herein, a polynucleotide that is “substantially complementary to at least part of” a messenger RNA (mRNA) refers to a polynucleotide that is substantially complementary to a contiguous portion of the mRNA of interest (e.g., an mRNA encoding AGT). For example, a polynucleotide is complementary to at least a part of an AGT mRNA if the sequence is substantially complementary to a non-interrupted portion of an mRNA encoding AGT.

[0202] Accordingly, in some embodiments, the antisense strand polynucleotides disclosed herein are fully complementary to the target AGT sequence. In other embodiments, the antisense strand polynucleotides disclosed herein are substantially complementary to the target AGT sequence and comprise a contiguous nucleotide sequence which is at least about 80% complementary over its entire length to the equivalent region of the nucleotide sequence of SEQ ID NO:1, or a fragment of SEQ ID NO:1, such as about 85%, about 90%, or about 95% complementary.

[0203] In one embodiment, an RNAi agent of the invention includes a sense strand that is substantially complementary to an antisense polynucleotide which, in turn, is complementary to a target AGT sequence, and wherein the sense strand polynucleotide comprises a contiguous nucleotide sequence which is at least about 80% complementary over its entire length to the equivalent region of the nucleotide sequence of SEQ ID NO:2, or a fragment of any one of SEQ ID NO:2, such as about 85%, about 90%, or about 95% complementary.

[0204] In general, the majority of nucleotides of each strand are ribonucleotides, but as described in detail herein, each or both strands can also include one or more non-ribonucleotides, e.g., a deoxyribonucleotide and/or a modified nucleotide. In addition, an “iRNA” may include ribonucleotides with chemical modifications. Such modifications may include all types of modifications disclosed herein or known in the art. Any such modifications, as used in an iRNA molecule, are encompassed by “iRNA” for the purposes of this specification and claims.

[0205] In one aspect of the invention, an agent for use in the methods and compositions of the invention is a single-stranded antisense RNA molecule that inhibits a target mRNA via an antisense inhibition mechanism. The single-stranded antisense RNA molecule is complementary to a sequence within the target mRNA. The single-stranded antisense oligonucleotides can inhibit translation in a stoichiometric manner by base pairing to the mRNA and physically obstructing the translation machinery, see Dias, N. et al., (2002) Mol Cancer Ther 1:347-355. The single-stranded antisense RNA molecule may be about 15 to about 30 nucleotides in length and have a sequence that is complementary to a target sequence. For example, the single-stranded antisense RNA molecule may comprise a sequence that is at least about 15, 16, 17, 18, 19, 20, or more contiguous nucleotides from any one of the antisense sequences described herein.

[0206] The term “inhibiting,” as used herein, is used interchangeably with “reducing,” “silencing,” “downregulating,” “suppressing” and other similar terms, and includes any level of inhibition.

[0207] The phrase “inhibiting expression of an AGT,” as used herein, includes inhibition of expression of any AGT gene (such as, e.g., a mouse AGT gene, a rat AGT gene, a monkey AGT gene, or a human AGT gene) as well as variants or mutants of an AGT gene that encode an AGT protein.

[0208] “Inhibiting expression of an AGT gene” includes any level of inhibition of an AGT gene, e.g., at least partial suppression of the expression of an AGT gene, such as an inhibition by at least about 20%. In certain embodiments, inhibition is by at least about 25%, at least about 30%, at least about 35%, at least about 40%, at least about 45%, at least about 50%, at least about 55%, at least about 60%, at least about 65%, at least about 70%, at least about 75%, at least about 80%, at least about 85%, at least about 90%, at least about 91%, at least about 92%, at least about 93%, at least about 94%, at least about 95%, at least about 96%, at least about 97%, at least about 98%, or at least about 99%.

[0209] The expression of an AGT gene may be assessed based on the level of any variable associated with AGT gene expression, e.g., AGT mRNA level or AGT protein level. Inhibition may be assessed by a decrease in an absolute or relative level of one or more of these variables compared with a control level. The control level may be any type of control level that is utilized in the art, e.g., a pre-dose baseline level, or a level determined from a similar subject, cell, or sample that is untreated or treated with a control (such as, e.g., buffer only control or inactive agent control).

[0210] In one embodiment, at least partial suppression of the expression of an AGT gene, is assessed by a reduction of the amount of AGT mRNA which can be isolated from or detected in a first cell or group of cells in which an AGT gene is transcribed and which has or have been treated such that the expression of an AGT gene is inhibited, as compared to a second cell or group of cells substantially identical to the first cell or group of cells but which has or have not been so treated (control cells). The degree of inhibition may be expressed in terms of:

$$\frac{( mRNA in control cells ) - ( mRNA in treated cells )}{( mRNA in control cells )} \cdot 100 \%$$

[0211] The phrase “contacting a cell with an RNAi agent,” such as a dsRNA, as used herein, includes contacting a cell by any possible means. Contacting a cell with an RNAi agent includes contacting a cell in vitro with the iRNA or contacting a cell in vivo with the iRNA. The contacting may be done directly or indirectly. Thus, for example, the RNAi agent may be put into physical contact with the cell by the individual performing the method, or alternatively, the RNAi agent may be put into a situation that will permit or cause it to subsequently come into contact with the cell.

[0212] Contacting a cell in vitro may be done, for example, by incubating the cell with the RNAi agent. Contacting a cell in vivo may be done, for example, by injecting the RNAi agent into or near the tissue where the cell is located, or by injecting the RNAi agent into another area, e.g., the bloodstream or the subcutaneous space, such that the agent will subsequently reach the tissue where the cell to be contacted is located. For example, the RNAi agent may contain and/or be coupled to a ligand, e.g., GalNAc3, that directs the RNAi agent to a site of interest, e.g., the liver. Combinations of in vitro and in vivo methods of contacting are also possible. For example, a cell may also be contacted in vitro with an RNAi agent and subsequently transplanted into a subject.

[0213] In one embodiment, contacting a cell with an iRNA includes “introducing” or “delivering the iRNA into the cell” by facilitating or effecting uptake or absorption into the cell. Absorption or uptake of an iRNA can occur through unaided diffusive or active cellular processes, or by auxiliary agents or devices. Introducing an iRNA into a cell may be in vitro and/or in vivo. For example, for in vivo introduction, iRNA can be injected into a tissue site or administered systemically. In vivo delivery can also be done by a beta-glucan delivery system, such as those described in U.S. Pat. Nos. 5,032,401 and 5,607,677, and U.S. Publication No. 2005/0281781, the entire contents of which are hereby incorporated herein by reference. In vitro introduction into a cell includes methods known in the art such as electroporation and lipofection. Further approaches are described herein below and/or are known in the art.

[0214] The term “lipid nanoparticle” or “LNP” is a vesicle comprising a lipid layer encapsulating a pharmaceutically active molecule, such as a nucleic acid molecule, e.g., an iRNA or a plasmid from which an iRNA is transcribed. LNPs are described in, for example, U.S. Pat. Nos. 6,858,225, 6,815,432, 8,158,601, and 8,058,069, the entire contents of which are hereby incorporated herein by reference.

[0215] As used herein, a “subject” is an animal, such as a mammal, including a primate (such as a human, a non-human primate, e.g., a monkey, and a chimpanzee), a non-primate (such as a cow, a pig, a camel, a llama, a horse, a goat, a rabbit, a sheep, a hamster, a guinea pig, a cat, a dog, a rat, a mouse, a horse, and a whale), or a bird (e.g., a duck or a goose). In an embodiment, the subject is a human, such as a human being treated or assessed for a disease, disorder or condition that would benefit from reduction in AGT expression; a human at risk for a disease, disorder or condition that would benefit from reduction in AGT expression; a human having a disease, disorder or condition that would benefit from reduction in AGT expression; and/or human being treated for a disease, disorder or condition that would benefit from reduction in AGT expression as described herein.

[0216] As used herein, the terms “treating” or “treatment” refer to a beneficial or desired result including, but not limited to, alleviation or amelioration of one or more symptoms associated with unwanted AGT expression, e.g., angiotensin II type 1 receptor activation (AT₁R) (e.g., hypertension, chronic kidney disease, stroke, myocardial infarction, heart failure, aneurysms, peripheral artery disease, heart disease, increased oxidative stress, e.g., increased superoxide formation, inflammation, vasoconstriction, sodium and water retention, potassium and magnesium loss, renin suppression, myocyte and smooth muscle hypertrophy, increased collagen synthesis, stimulation of vascular, myocardial and renal fibrosis, increased rate and force of cardiac contractions, altered heart rate, e.g., increased arrhythmia, stimulation of plasminogen activator inhibitor 1 (PAI1), activation of the sympathetic nervous system, and increased endothelin secretion), symptoms of pregnancy-associated hypertension (e.g., preeclampsia, and eclampsia), including, but not limited to intrauterine growth restriction (IUGR) or fetal growth restriction, symptoms associated with malignant hypertension, symptoms associated with hyperaldosteronism; diminishing the extent of unwanted AT₁R activation; stabilization (i.e., not worsening) of the state of chronic AT₁R activation; amelioration or palliation of unwanted AT₁R activation (e.g., hypertension, chronic kidney disease, stroke, myocardial infarction, heart failure, aneurysms, peripheral artery disease, heart disease, increased oxidative stress, e.g., increased superoxide formation, inflammation, vasoconstriction, sodium and water retention, potassium and magnesium loss, renin suppression, myocyte and smooth muscle hypertrophy, increased collagen sysnthesis, stimulation of vascular, myocardial and renal fibrosis, increased rate and force of cardiac contractions, altered heart rate, e.g., increased arrhythmia, stimulation of plasminogen activator inhibitor 1 (PAI1), activation of the sympathetic nervous system, and increased endothelin secretion) whether detectable or undetectable. “Treatment” can also mean prolonging survival as compared to expected survival in the absence of treatment.

[0217] The term “lower” in the context of the level of AGT in a subject or a disease marker or symptom refers to a statistically significant decrease in such level. The decrease can be, for example, at least 10%, at least 15%, at least 20%, at least 25%, at least 30%, at least 35%, at least 40%, at least 45%, at least 50%, at least 55%, at least 60%, at least 65%, at least 70%, at least 75%, at least 80%, at least 85%, at least 90%, at least 95%, or more and is preferably down to a level accepted as within the range of normal for an individual without such disorder.

[0218] As used herein, “prevention” or “preventing,” when used in reference to a disease, disorder or condition thereof, that would benefit from a reduction in expression of an AGT gene, refers to a reduction in the likelihood that a subject will develop a symptom associated with such a disease, disorder, or condition, e.g., a symptom of unwanted AT₁R activation, such as a hypertension, chronic kidney disease, stroke, myocardial infarction, heart failure, aneurysms, peripheral artery disease, heart disease, increased oxidative stress, e.g., increased superoxide formation, inflammation, vasoconstriction, sodium and water retention, potassium and magnesium loss, renin suppression, myocyte and smooth muscle hypertrophy, increased collagen synthesis, stimulation of vascular, myocardial and renal fibrosis, increased rate and force of cardiac contractions, altered heart rate, e.g., increased arrhythmia, stimulation of plasminogen activator inhibitor 1 (PAI1), activation of the sympathetic nervous system, and increased endothelin secretion. The likelihood of developing, e.g., hypertension, is reduced, for example, when an individual having one or more risk factors for a hypertension either fails to develop hypertension or develops hypertension with less severity relative to a population having the same risk factors and not receiving treatment as described herein. The failure to develop a disease, disorder or condition, or the reduction in the development of a symptom associated with such a disease, disorder or condition (e.g., by at least about 10% on a clinically accepted scale for that disease or disorder), or the exhibition of delayed symptoms delayed (e.g., by days, weeks, months or years) is considered effective prevention.

[0219] As used herein, the term “angiotensinogen-associated disease” or “AGT-associated disease,” is a disease or disorder that is caused by, or associated with renin-angiotensin-aldosterone system (RAAS) activation, or a disease or disorder the symptoms of which or progression of which responds to RAAS inactivation. The term “angiotensinogen-associated disease” includes a disease, disorder or condition that would benefit from reduction in AGT expression. Such diseases are typically associated with high blood pressure. Non-limiting examples of angiotensinogen-associated diseases include hypertension, e.g., borderline hypertension (also known as prehypertension), primary hypertension (also known as essential hypertension or idiopathic hypertension), secondary hypertension (also known as inessential hypertension), hypertensive emergency (also known as malignant hypertension), hypertensive urgency, isolated systolic or diastolic hypertension, pregnancy-associated hypertension (e.g., preeclampsia, eclampsia, and post-partum preelampsia), diabetic hypertension, resistant hypertension, refractory hypertension, paroxysmal hypertension, renovascular hypertension (also known as renal hypertension), Goldblatt hypertension, ocular hypertension, glaucoma, pulmonary hypertension, portal hypertension, systemic venous hypertension, systolic hypertension, labile hypertension; hypertensive heart disease, hypertensive nephropathy, atherosclerosis, arteriosclerosis, vasculopathy (including peripheral vascular disease), diabetic nephropathy, diabetic retinopathy, chronic heart failure, cardiomyopathy, diabetic cardiac myopathy, glomerulosclerosis, coarctation of the aorta, aortic aneurism, ventricular fibrosis, Cushing's syndrome, and other glucocorticoid excess states including chronic steroid therapy, pheochromocytoma, reninoma, secondary aldosteronism and other mineralocorticoid excess states, sleep apnea, thyroid/parathyroid disease, heart failure (e.g., left ventricular systolic dysfunction), myocardial infarction, angina, stroke, diabetes mellitus (e.g., diabetic nephropathy), renal disease e.g., chronic kidney disease or diabetic nephropathy optionally in the context of pregnancy, renal failure, e.g., chronic renal failure, cognitive dysfunction (such as Alzheimer's), and systemic sclerosis (e.g., scleroderma renal crisis). In certain embodiments, AGT-associated disease includes intrauterine growth restriction (IUGR) or fetal growth restriction.

[0220] Based on the average of seated blood pressure readings that are properly measured during two or more office visits, a subject having a normal blood pressure is one having a systolic pressure of about 90-119 mmHg (about 12-15.9 kPa (kN/m²)) and a diastolic pressure of about 60-79 mmHg (about 8.0-10.5 kPa (kN/m²)); a subject having prehypertension is one having a systolic pressure of about 120-139 mmHg (about 16.1-18.5 kPa (kN/m²)) and a diastolic pressure of about 60-79 mmHg (about 8.0-10.5 kPa (kN/m²)); a subject having hypertension (e.g., Stage I hypertension) is one having a systolic pressure of about 140-159 mmHg (about 18.7-21.2 kPa (kN/m²)) and a diastolic pressure of about 90-99 mmHg (about 12.0-13.2 kPa (kN/m²)); and a subject having hypertension (e.g., Stage II hypertension) is one having a systolic pressure of about ≥160 mmHg (about ≥21.3 kPa (kN/m²)) and a diastolic pressure of about ≥100 mmHg (about ≥13.3 kPa (kN/m²)). Subjects with blood pressures over 130/80 mmHg along with Type 1 or Type 2 diabetes, or kidney disease are considered as having hypertension.

[0221] In one embodiment, an angiotensinogen-associated disease is primary hypertension. “Primary hypertension” is a result of environmental or genetic causes (e.g., a result of no obvious underlying medical cause).

[0222] In one embodiment, an angiotensinogen-associated disease is secondary hypertension. “Secondary hypertension” has an identifiable underlying disorder which can be of multiple etiologies, including renal, vascular, and endocrine causes, e.g., renal parenchymal disease (e.g., polycystic kidneys, glomerular or interstitial disease), renal vascular disease (e.g., renal artery stenosis, fibromuscular dysplasia), endocrine disorders (e.g., adrenocorticosteroid or mineralocorticoid excess, pheochromocytoma, hyperthyroidism or hypothyroidism, growth hormone excess, hyperparathyroidism), coarctation of the aorta, or oral contraceptive use.

[0223] In one embodiment, an angiotensinogen-associated disease is a hypertensive emergency, e.g., malignant hypertension and accelerated hypertension. “Accelerated hypertension” is severely elevated blood pressure (i.e., equal to or greater than a systolic 180 mmHg or diastolic of 110 mmHg) with direct damage to one or more end organs. Blood pressure must be reduced immediately to prevent further organ damage. “Malignant hypertension” is severely elevated blood pressure (i.e., equal to or greater than a systolic 180 mmHg or diastolic of 110 mmHg) with direct damage to one or more end organs and papilledema. Blood pressure must be reduced immediately to prevent further organ damage. Neurologic end-organ damage due to uncontrolled blood pressure may include hypertensive encephalopathy, cerebral vascular accident/cerebral infarction; subarachnoid hemorrhage, and/or intracranial hemorrhage. Cardiovascular end-organ damage may include myocardial ischemia/infarction, acute left ventricular dysfunction, acute pulmonary edema, and/or aortic dissection. Other organ systems may also be affected by uncontrolled hypertension, which may lead to acute renal failure/insufficiency, retinopathy, eclampsia, or microangiopathic hemolytic anemia.

[0224] In one embodiment, an angiotensinogen-associated disease is a hypertensive urgency. “Hypertensive urgency” is severely elevated blood pressure (i.e., equal to or greater than a systolic 180 mmHg or diastolic of 110 mmHg) with no direct damage to one or more organs. Blood pressure can be brought down safely within a few hours.

[0225] In one embodiment, an angiotensinogen-associated disease is pregnancy-associated hypertension, e.g., chronic hypertension of pregnancy, gestational hypertension, preeclampsia, eclampsia, preeclampsia superimposed on chronic hypertension, HELLP syndrome, and gestational hypertension (also known as transient hypertension of pregnancy, chronic hypertension identified in the latter half of pregnancy, and pregnancy-induced hypertension (PIH)). A subject having “chronic hypertension of pregnancy” is one having a blood pressure exceeding 140/90 mm Hg before pregnancy or before 20 weeks' gestation. “Gestational hypertension” or “pregnancy-induced hypertension” refers to hypertension with onset in the latter part of pregnancy (>20 weeks' gestation) without any other features of preeclampsia, and followed by normalization of the blood pressure postpartum. “Mild preeclampsia” is defined as the presence of hypertension (blood pressure ≥140/90 mm Hg) on two occasions, at least six hours apart, but without evidence of end-organ damage, in a woman who was normotensive before 20 weeks' gestation. In a subject with preexisting essential hypertension, preeclampsia is diagnosed if systolic blood pressure has increased by 30 mm Hg or if diastolic blood pressure has increased by 15 mm Hg. “Severe preeclampsia” is defined as the presence of 1 of the following symptoms or signs in the presence of preeclampsia; asystolic blood pressure of 160 mm Hg or higher or diastolic blood pressure of 110 mm Hg or higher on two occasions at least six hours apart; proteinuria of more than 5 g in a 24-hour collection or more than 3+ on two random urine samples collected at least four hours apart, pulmonary edema or cyanosis, oliguria (<400 mL in 24 hours), persistent headaches, epigastric pain and/or impaired liver function, thrombocytopenia, oligohydramnios, decreased fetal growth, or placental abruption. “Eclampsia” is defined as seizures that cannot be attributable to other causes in a woman with preeclampsia. “HELLP syndrome” (also known as edema-proteinuria-hypertension gestosis type B) is Hemolysis, Elevated Liver enzyme levels, and Low Platelet levels in a pregnant subject.

[0226] In one embodiment, an angiotensinogen-associated disease is resistant hypertension. “Resistant hypertension” is blood pressure that remains above goal (e.g., 140/90 mmHg) in spite of concurrent use of three antihypertensive agents of different classes, one of which is a thiazide diuretic. Subjects whose blood pressure is controlled with four or more medications are also considered to have resistant hypertension.

[0227] “Therapeutically effective amount,” as used herein, is intended to include the amount of an RNAi agent that, when administered to a subject having an angiotensinogen-associated disease, is sufficient to effect treatment of the disease (e.g., by diminishing, ameliorating or maintaining the existing disease or one or more symptoms of disease). The “therapeutically effective amount” may vary depending on the RNAi agent, how the agent is administered, the disease and its severity and the history, age, weight, family history, genetic makeup, the types of preceding or concomitant treatments, if any, and other individual characteristics of the subject to be treated.

[0228] “Prophylactically effective amount,” as used herein, is intended to include the amount of an iRNA that, when administered to a subject having an angiotensinogen-associated disease, is sufficient to prevent or ameliorate the disease or one or more symptoms of the disease in a subject susceptible to the disease, i.e., more likely to suffer from the disease than those in the general population due to one or more factors, e.g., age, weight, pregnancy. Ameliorating the disease includes slowing the course of the disease or reducing the severity of later-developing disease. The “prophylactically effective amount” may vary depending on the iRNA, how the agent is administered, the degree of risk of disease, and the history, age, weight, family history, genetic makeup, the types of preceding or concomitant treatments, if any, and other individual characteristics of the patient to be treated.

[0229] A “therapeutically-effective amount” or “prophylactically effective amount” also includes an amount of an RNAi agent that produces some desired local or systemic effect at a reasonable benefit/risk ratio applicable to any treatment. iRNA employed in the methods of the present invention may be administered in a sufficient amount to produce a reasonable benefit/risk ratio applicable to such treatment.

[0230] The phrase “pharmaceutically acceptable” is employed herein to refer to those compounds, materials, compositions, and/or dosage forms which are, within the scope of sound medical judgment, suitable for use in contact with the tissues of human subjects and animal subjects without excessive toxicity, irritation, allergic response, or other problem or complication, commensurate with a reasonable benefit/risk ratio.

[0231] The phrase “pharmaceutically-acceptable carrier” as used herein means a pharmaceutically-acceptable material, composition or vehicle, such as a liquid or solid filler, diluent, excipient, manufacturing aid (e.g., lubricant, talc magnesium, calcium or zinc stearate, or steric acid), or solvent encapsulating material, involved in carrying or transporting the subject compound from one organ, or portion of the body, to another organ, or portion of the body. Each carrier must be “acceptable” in the sense of being compatible with the other ingredients of the formulation and not injurious to the subject being treated. Some examples of materials which can serve as pharmaceutically-acceptable carriers include: (1) sugars, such as lactose, glucose and sucrose; (2) starches, such as corn starch and potato starch; (3) cellulose, and its derivatives, such as sodium carboxymethyl cellulose, ethyl cellulose and cellulose acetate; (4) powdered tragacanth; (5) malt; (6) gelatin; (7) lubricating agents, such as magnesium state, sodium lauryl sulfate and talc; (8) excipients, such as cocoa butter and suppository waxes; (9) oils, such as peanut oil, cottonseed oil, safflower oil, sesame oil, olive oil, corn oil and soybean oil; (10) glycols, such as propylene glycol; (11) polyols, such as glycerin, sorbitol, mannitol and polyethylene glycol; (12) esters, such as ethyl oleate and ethyl laurate; (13) agar; (14) buffering agents, such as magnesium hydroxide and aluminum hydroxide; (15) alginic acid; (16) pyrogen-free water; (17) isotonic saline; (18) Ringer's solution; (19) ethyl alcohol; (20) pH buffered solutions; (21) polyesters, polycarbonates and/or polyanhydrides; (22) bulking agents, such as polypeptides and amino acids (23) serum component, such as serum albumin, HDL and LDL; and (22) other non-toxic compatible substances employed in pharmaceutical formulations.

[0232] The term “sample,” as used herein, includes a collection of similar fluids, cells, or tissues isolated from a subject, as well as fluids, cells, or tissues present within a subject. Examples of biological fluids include blood, serum and serosal fluids, plasma, cerebrospinal fluid, ocular fluids, lymph, urine, saliva, and the like. Tissue samples may include samples from tissues, organs or localized regions. For example, samples may be derived from particular organs, parts of organs, or fluids or cells within those organs. In certain embodiments, samples may be derived from the liver (e.g., whole liver or certain segments of liver or certain types of cells in the liver, such as, e.g., hepatocytes). In some embodiments, a “sample derived from a subject” refers to blood or plasma drawn from the subject.

### II. iRNAs of the Invention

[0233] The present invention provides iRNAs which inhibit the expression of an AGT gene. In one embodiment, the iRNA agent includes double-stranded ribonucleic acid (dsRNA) molecules for inhibiting the expression of an AGT gene in a cell, such as a cell within a subject, e.g., a mammal, such as a human having an angiotensinogen-associated disease, e.g., hypertension. The dsRNA includes an antisense strand having a region of complementarity which is complementary to at least a part of an mRNA formed in the expression of an AGT gene. The region of complementarity is about 30 nucleotides or less in length (e.g., about 30, 29, 28, 27, 26, 25, 24, 23, 22, 21, 20, 19, or 18 nucleotides or less in length). Upon contact with a cell expressing the AGT gene, the iRNA inhibits the expression of the AGT gene (e.g., a human, a primate, a non-primate, or a bird AGT gene) by at least about 10% as assayed by, for example, a PCR or branched DNA (bDNA)-based method, or by a protein-based method, such as by immunofluorescence analysis, using, for example, western blotting or flowcytometric techniques.

[0234] A dsRNA includes two RNA strands that are complementary and hybridize to form a duplex structure under conditions in which the dsRNA will be used. One strand of a dsRNA (the antisense strand) includes a region of complementarity that is substantially complementary, and generally fully complementary, to a target sequence. The target sequence can be derived from the sequence of an mRNA formed during the expression of an AGT gene. The other strand (the sense strand) includes a region that is complementary to the antisense strand, such that the two strands hybridize and form a duplex structure when combined under suitable conditions. As described elsewhere herein and as known in the art, the complementary sequences of a dsRNA can also be contained as self-complementary regions of a single nucleic acid molecule, as opposed to being on separate oligonucleotides.

[0235] Generally, the duplex structure is between 15 and 30 base pairs in length, e.g., between, 15-29, 15-28, 15-27, 15-26, 15-25, 15-24, 15-23, 15-22, 15-21, 15-20, 15-19, 15-18, 15-17, 18-30, 18-29, 18-28, 18-27, 18-26, 18-25, 18-24, 18-23, 18-22, 18-21, 18-20, 19-30, 19-29, 19-28, 19-27, 19-26, 19-25, 19-24, 19-23, 19-22, 19-21, 19-20, 20-30, 20-29, 20-28, 20-27, 20-26, 20-25, 20-24,20-23, 20-22, 20-21, 21-30, 21-29, 21-28, 21-27, 21-26, 21-25, 21-24, 21-23, or 21-22 base pairs in length. Ranges and lengths intermediate to the above recited ranges and lengths are also contemplated to be part of the invention.

[0236] Similarly, the region of complementarity to the target sequence is between 15 and 30 nucleotides in length, e.g., between 15-29, 15-28, 15-27, 15-26, 15-25, 15-24, 15-23, 15-22, 15-21, 15-20, 15-19, 15-18, 15-17, 18-30, 18-29, 18-28, 18-27, 18-26, 18-25, 18-24, 18-23, 18-22, 18-21, 18-20, 19-30, 19-29, 19-28, 19-27, 19-26, 19-25, 19-24, 19-23, 19-22, 19-21, 19-20, 20-30, 20-29, 20-28, 20-27, 20-26, 20-25, 20-24,20-23, 20-22, 20-21, 21-30, 21-29, 21-28, 21-27, 21-26, 21-25, 21-24, 21-23, or 21-22 nucleotides in length. Ranges and lengths intermediate to the above recited ranges and lengths are also contemplated to be part of the invention.

[0237] In some embodiments, the dsRNA is about 15 to about 20 nucleotides in length, about 25 to about 30 nucleotides in length, or about 15 to about 23 nucleotides in length. In general, the dsRNA is long enough to serve as a substrate for the Dicer enzyme. For example, it is well-known in the art that dsRNAs longer than about 21-23 nucleotides in length may serve as substrates for Dicer. As the ordinarily skilled person will also recognize, the region of an RNA targeted for cleavage will most often be part of a larger RNA molecule, often an mRNA molecule. Where relevant, a “part” of an mRNA target is a contiguous sequence of an mRNA target of sufficient length to allow it to be a substrate for RNAi-directed cleavage (i.e., cleavage through a RISC pathway).

[0238] One of skill in the art will also recognize that the duplex region is a primary functional portion of a dsRNA, e.g., a duplex region of about 9 to 36 base pairs, e.g., about 10-36, 11-36, 12-36, 13-36, 14-36, 15-36, 9-35, 10-35, 11-35, 12-35, 13-35, 14-35, 15-35, 9-34, 10-34, 11-34, 12-34, 13-34, 14-34, 15-34, 9-33, 10-33, 11-33, 12-33, 13-33, 14-33, 15-33, 9-32, 10-32, 11-32, 12-32, 13-32, 14-32, 15-32, 9-31, 10-31, 11-31, 12-31, 13-32, 14-31, 15-31, 15-30, 15-29, 15-28, 15-27, 15-26, 15-25, 15-24, 15-23, 15-22, 15-21, 15-20, 15-19, 15-18, 15-17, 18-30, 18-29, 18-28, 18-27, 18-26, 18-25, 18-24, 18-23, 18-22, 18-21, 18-20, 19-30, 19-29, 19-28, 19-27, 19-26, 19-25, 19-24, 19-23, 19-22, 19-21, 19-20, 20-30, 20-29, 20-28, 20-27, 20-26, 20-25, 20-24,20-23, 20-22, 20-21, 21-30, 21-29, 21-28, 21-27, 21-26, 21-25, 21-24, 21-23, or 21-22 base pairs. Thus, in one embodiment, to the extent that it becomes processed to a functional duplex, of e.g., 15-30 base pairs, that targets a desired RNA for cleavage, an RNA molecule or complex of RNA molecules having a duplex region greater than 30 base pairs is a dsRNA. Thus, an ordinarily skilled artisan will recognize that in one embodiment, a miRNA is a dsRNA. In another embodiment, a dsRNA is not a naturally occurring miRNA. In another embodiment, an iRNA agent useful to target AGT expression is not generated in the target cell by cleavage of a larger dsRNA.

[0239] A dsRNA as described herein can further include one or more single-stranded nucleotide overhangs e.g., 1, 2, 3, or 4 nucleotides. dsRNAs having at least one nucleotide overhang can have unexpectedly superior inhibitory properties relative to their blunt-ended counterparts. A nucleotide overhang can comprise or consist of a nucleotide/nucleoside analog, including a deoxynucleotide/nucleoside. The overhang(s) can be on the sense strand, the antisense strand or any combination thereof. Furthermore, the nucleotide(s) of an overhang can be present on the 5′-end, 3′-end or both ends of either an antisense or sense strand of a dsRNA. As discussed herein, extended overhang of up to 30 nucleotides in length are also contemplated in various embodiments of the invention.

[0240] A dsRNA can be synthesized by standard methods known in the art as further discussed below, e.g., by use of an automated DNA synthesizer, such as are commercially available from, for example, Biosearch, Applied Biosystems®, Inc.

[0241] iRNA compounds of the invention may be prepared using a two-step procedure. First, the individual strands of the double-stranded RNA molecule are prepared separately. Then, the component strands are annealed. The individual strands of the siRNA compound can be prepared using solution-phase or solid-phase organic synthesis or both. Organic synthesis offers the advantage that the oligonucleotide strands comprising unnatural or modified nucleotides can be easily prepared. Single-stranded oligonucleotides of the invention can be prepared using solution-phase or solid-phase organic synthesis or both.

[0242] In one aspect, a dsRNA of the invention includes at least two nucleotide sequences, a sense sequence and an anti-sense sequence. The sense strand is selected from the group of sequences provided in any one of Tables 3, 4, 7, 8, 11, 13, and 15, and the corresponding antisense strand of the sense strand is selected from the group of sequences of any one of Tables 3, 4, 7, 8, 11, 13, and 15. In this aspect, one of the two sequences is complementary to the other of the two sequences, with one of the sequences being substantially complementary to a sequence of an mRNA generated in the expression of an AGT gene. As such, in this aspect, a dsRNA will include two oligonucleotides, where one oligonucleotide is described as the sense strand in any one of Tables 3, 4, 7, 8, 11, 13, and 15, and the second oligonucleotide is described as the corresponding antisense strand of the sense strand in any one of Tables 3, 4, 7, 8, 11, 13, and 15. In one embodiment, the substantially complementary sequences of the dsRNA are contained on separate oligonucleotides. In another embodiment, the substantially complementary sequences of the dsRNA are contained on a single oligonucleotide.

[0243] It will be understood that, although some of the sequences in Tables 3, 4, 7, 8, 11, 13, and 15 are described as modified and/or conjugated sequences, the RNA of the iRNA of the invention e.g., a dsRNA of the invention, may comprise any one of the sequences set forth in Tables 3, 4, 7, 8, 11, 13, and 15 that is un-modified, un-conjugated, and/or modified and/or conjugated differently than described therein.

[0244] In another aspect, a double-stranded ribonucleic acid (dsRNA) of the invention for inhibiting expression of angiotensinogen comprises, consists essentially of, or consists of a sense strand and an antisense strand, wherein the sense strand comprises the nucleotide sequence of a sense strand in Table 3, 4, 7, 8, 11, 13, and 15 and the antisense strand comprises the nucleotide sequence of the corresponding antisense strand in Tables 3, 4, 7, 8, 11, 13, and 15.

[0245] The skilled person is well aware that dsRNAs having a duplex structure of about 20 to 23 base pairs, e.g., 21, base pairs have been hailed as particularly effective in inducing RNA interference (Elbashir et al., EMBO 2001, 20:6877-6888). However, others have found that shorter or longer RNA duplex structures can also be effective (Chu and Rana (2007) RNA 14:1714-1719; Kim et al. (2005) Nat Biotech 23:222-226). In the embodiments described above, by virtue of the nature of the oligonucleotide sequences provided in any one of Tables 3, 4, 7, 8, 11, 13, and 15, dsRNAs described herein can include at least one strand of a length of minimally 21 nucleotides. It can be reasonably expected that shorter duplexes having one of the sequences of any one of Tables 3, 4, 7, 8, 11, 13, and 15 minus only a few nucleotides on one or both ends can be similarly effective as compared to the dsRNAs described above. Hence, dsRNAs having a sequence of at least 15, 16, 17, 18, 19, 20, or more contiguous nucleotides derived from one of the sequences of any one of Tables 3, 4, 7, 8, 11, 13, and 15, and differing in their ability to inhibit the expression of a AGT gene by not more than about 5, 10, 15, 20, 25, or 30% inhibition from a dsRNA comprising the full sequence, are contemplated to be within the scope of the present invention.

[0246] In addition, the RNAs provided in any one of Tables 3, 4, 7, 8, 11, 13, and 15 identify a site(s) in a AGT transcript that is susceptible to RISC-mediated cleavage. As such, the present invention further features iRNAs that target within one of these sites. As used herein, an iRNA is said to target within a particular site of an RNA transcript if the iRNA promotes cleavage of the transcript anywhere within that particular site. Such an iRNA will generally include at least about 15 contiguous nucleotides from one of the sequences provided in any one of Tables 3, 4, 7, 8, 11, 13, and 15 coupled to additional nucleotide sequences taken from the region contiguous to the selected sequence in a AGT gene.

[0247] While a target sequence is generally about 15-30 nucleotides in length, there is wide variation in the suitability of particular sequences in this range for directing cleavage of any given target RNA. Various software packages and the guidelines set out herein provide guidance for the identification of optimal target sequences for any given gene target, but an empirical approach can also be taken in which a “window” or “mask” of a given size (as a non-limiting example, 21 nucleotides) is literally or figuratively (including, e.g., in silico) placed on the target RNA sequence to identify sequences in the size range that can serve as target sequences. By moving the sequence “window” progressively one nucleotide upstream or downstream of an initial target sequence location, the next potential target sequence can be identified, until the complete set of possible sequences is identified for any given target size selected. This process, coupled with systematic synthesis and testing of the identified sequences (using assays as described herein or as known in the art) to identify those sequences that perform optimally can identify those RNA sequences that, when targeted with an iRNA agent, mediate the best inhibition of target gene expression. Thus, while the sequences identified, for example, in any one of Tables 3, 4, 7, 8, 11, 13, and 15 represent effective target sequences, it is contemplated that further optimization of inhibition efficiency can be achieved by progressively “walking the window” one nucleotide upstream or downstream of the given sequences to identify sequences with equal or better inhibition characteristics.

[0248] Further, it is contemplated that for any sequence identified, e.g., in any one of Tables 3, 4, 7, 8, 11, 13, and 15, further optimization could be achieved by systematically either adding or removing nucleotides to generate longer or shorter sequences and testing those sequences generated by walking a window of the longer or shorter size up or down the target RNA from that point. Again, coupling this approach to generating new candidate targets with testing for effectiveness of iRNAs based on those target sequences in an inhibition assay as known in the art and/or as described herein can lead to further improvements in the efficiency of inhibition. Further still, such optimized sequences can be adjusted by, e.g., the introduction of modified nucleotides as described herein or as known in the art, addition or changes in overhang, or other modifications as known in the art and/or discussed herein to further optimize the molecule (e.g., increasing serum stability or circulating half-life, increasing thermal stability, enhancing transmembrane delivery, targeting to a particular location or cell type, increasing interaction with silencing pathway enzymes, increasing release from endosomes) as an expression inhibitor.

[0249] An iRNA as described herein can contain one or more mismatches to the target sequence. In one embodiment, an iRNA as described herein contains no more than 3 mismatches. If the antisense strand of the iRNA contains mismatches to a target sequence, it is preferable that the area of mismatch is not located in the center of the region of complementarity. If the antisense strand of the iRNA contains mismatches to the target sequence, it is preferable that the mismatch be restricted to be within the last 5 nucleotides from either the 5′- or 3′-end of the region of complementarity. For example, for a 23 nucleotide iRNA agent the strand which is complementary to a region of an AGT gene, generally does not contain any mismatch within the central 13 nucleotides. The methods described herein or methods known in the art can be used to determine whether an iRNA containing a mismatch to a target sequence is effective in inhibiting the expression of an AGT gene. Consideration of the efficacy of iRNAs with mismatches in inhibiting expression of an AGT gene is important, especially if the particular region of complementarity in an AGT gene is known to have polymorphic sequence variation within the population.

### III. Modified iRNAs of the Invention

[0250] In one embodiment, the RNA of the iRNA of the invention e.g., a dsRNA, is un-modified, and does not comprise, e.g., chemical modifications and/or conjugations known in the art and described herein. In another embodiment, the RNA of an iRNA of the invention, e.g., a dsRNA, is chemically modified to enhance stability or other beneficial characteristics. In certain embodiments of the invention, substantially all of the nucleotides of an iRNA of the invention are modified. In other embodiments of the invention, all of the nucleotides of an iRNA of the invention are modified iRNAs of the invention in which “substantially all of the nucleotides are modified” are largely but not wholly modified and can include not more than 5, 4, 3, 2, or 1 unmodified nucleotides.

[0251] The nucleic acids featured in the invention can be synthesized and/or modified by methods well established in the art, such as those described in “Current protocols in nucleic acid chemistry,” Beaucage, S. L. et al. (Edrs.), John Wiley & Sons, Inc., New York, N.Y., USA, which is hereby incorporated herein by reference. Modifications include, for example, end modifications, e.g., 5′-end modifications (phosphorylation, conjugation, inverted linkages) or 3′-end modifications (conjugation, DNA nucleotides, inverted linkages, etc.); base modifications, e.g., replacement with stabilizing bases, destabilizing bases, or bases that base pair with an expanded repertoire of partners, removal of bases (abasic nucleotides), or conjugated bases; sugar modifications (e.g., at the 2′-position or 4′-position) or replacement of the sugar; and/or backbone modifications, including modification or replacement of the phosphodiester linkages. Specific examples of iRNA compounds useful in the embodiments described herein include, but are not limited to RNAs containing modified backbones or no natural internucleoside linkages. RNAs having modified backbones include, among others, those that do not have a phosphorus atom in the backbone. For the purposes of this specification, and as sometimes referenced in the art, modified RNAs that do not have a phosphorus atom in their internucleoside backbone can also be considered to be oligonucleosides. In some embodiments, a modified iRNA will have a phosphorus atom in its internucleoside backbone.

[0252] Modified RNA backbones include, for example, phosphorothioates, chiral phosphorothioates, phosphorodithioates, phosphotriesters, aminoalkylphosphotriesters, methyl and other alkyl phosphonates including 3′-alkylene phosphonates and chiral phosphonates, phosphinates, phosphoramidates including 3′-amino phosphoramidate and aminoalkylphosphoramidates, thionophosphoramidates, thionoalkylphosphonates, thionoalkylphosphotriesters, and boranophosphates having normal 3′-5′ linkages, 2′-5′-linked analogs of these, and those having inverted polarity wherein the adjacent pairs of nucleoside units are linked 3′-5′ to 5′-3′ or 2′-5′ to 5′-2′. Various salts, mixed salts and free acid forms are also included.

[0253] Representative U.S. patents that teach the preparation of the above phosphorus-containing linkages include, but are not limited to, U.S. Pat. Nos. 3,687,808; 4,469,863; 4,476,301; 5,023,243; 5,177,195; 5,188,897; 5,264,423; 5,276,019; 5,278,302; 5,286,717; 5,321,131; 5,399,676; 5,405,939; 5,453,496; 5,455,233; 5,466,677; 5,476,925; 5,519,126; 5,536,821; 5,541,316; 5,550,111; 5,563,253; 5,571,799; 5,587,361; 5,625,050; 6,028,188; 6,124,445; 6,160,109; 6,169,170; 6,172,209; 6,239,265; 6,277,603; 6,326,199; 6,346,614; 6,444,423; 6,531,590; 6,534,639; 6,608,035; 6,683,167; 6,858,715; 6,867,294; 6,878,805; 7,015,315; 7,041,816; 7,273,933; 7,321,029; and U.S. Pat. RE39464, the entire contents of each of which are hereby incorporated herein by reference.

[0254] Modified RNA backbones that do not include a phosphorus atom therein have backbones that are formed by short chain alkyl or cycloalkyl internucleoside linkages, mixed heteroatoms and alkyl or cycloalkyl internucleoside linkages, or one or more short chain heteroatomic or heterocyclic internucleoside linkages. These include those having morpholino linkages (formed in part from the sugar portion of a nucleoside); siloxane backbones; sulfide, sulfoxide and sulfone backbones; formacetyl and thioformacetyl backbones; methylene formacetyl and thioformacetyl backbones; alkene containing backbones; sulfamate backbones; methyleneimino and methylenehydrazino backbones; sulfonate and sulfonamide backbones; amide backbones; and others having mixed N, O, S and CH₂ component parts.

[0255] Representative U.S. patents that teach the preparation of the above oligonucleosides include, but are not limited to, U.S. Pat. Nos. 5,034,506; 5,166,315; 5,185,444; 5,214,134; 5,216,141; 5,235,033; 5,64,562; 5,264,564; 5,405,938; 5,434,257; 5,466,677; 5,470,967; 5,489,677; 5,541,307; 5,561,225; 5,596,086; 5,602,240; 5,608,046; 5,610,289; 5,618,704; 5,623,070; 5,663,312; 5,633,360; 5,677,437; and, 5,677,439, the entire contents of each of which are hereby incorporated herein by reference.

[0256] In other embodiments, suitable RNA mimetics are contemplated for use in iRNAs, in which both the sugar and the internucleoside linkage, i.e., the backbone, of the nucleotide units are replaced with novel groups. The base units are maintained for hybridization with an appropriate nucleic acid target compound. One such oligomeric compound, an RNA mimetic that has been shown to have excellent hybridization properties, is referred to as a peptide nucleic acid (PNA). In PNA compounds, the sugar backbone of an RNA is replaced with an amide containing backbone, in particular an aminoethylglycine backbone. The nucleobases are retained and are bound directly or indirectly to aza nitrogen atoms of the amide portion of the backbone. Representative U.S. patents that teach the preparation of PNA compounds include, but are not limited to, U.S. Pat. Nos. 5,539,082; 5,714,331; and 5,719,262, the entire contents of each of which are hereby incorporated herein by reference. Additional PNA compounds suitable for use in the iRNAs of the invention are described in, for example, in Nielsen et al., Science, 1991, 254, 1497-1500.

[0257] Some embodiments featured in the invention include RNAs with phosphorothioate backbones and oligonucleosides with heteroatom backbones, and in particular —CH₂—NH —CH₂—, —CH₂—N(CH₃)—O—CH₂— [known as a methylene (methylimino) or MMI backbone], —CH₂—O—N(CH₃)—CH₂—, —CH₂—N(CH₃)—N(CH₃)—CH₂— and —N(CH₃)—CH₂—CH₂—[wherein the native phosphodiester backbone is represented as —O—P—O—CH₂—] of the above-referenced U.S. Pat. No. 5,489,677, and the amide backbones of the above-referenced U.S. Pat. No. 5,602,240. In some embodiments, the RNAs featured herein have morpholino backbone structures of the above-referenced U.S. Pat. No. 5,034,506.

[0258] Modified RNAs can also contain one or more substituted sugar moieties. The iRNAs, e.g., dsRNAs, featured herein can include one of the following at the 2′-position: OH; F; O—, S—, or N-alkyl; O—, S—, or N-alkenyl; O—, S- or N-alkynyl; or O-alkyl-O-alkyl, wherein the alkyl, alkenyl and alkynyl can be substituted or unsubstituted C₁ to C₁₀ alkyl or C₂ to C₁₀ alkenyl and alkynyl. Exemplary suitable modifications include O[(CH₂)ₙO]ₘCH₃, O(CH₂)₋ₙOCH₃, O(CH₂)ₙNH₂, O(CH₂)ₙCH₃, O(CH₂)ₙONH₂, and O(CH₂)ₙON[(CH₂)ₙCH₃)]₂, where n and m are from 1 to about 10. In other embodiments, dsRNAs include one of the following at the 2′ position: C₁ to C₁₀ lower alkyl, substituted lower alkyl, alkaryl, aralkyl, O-alkaryl or O-aralkyl, SH, SCH₃, OCN, Cl, Br, CN, CF₃, OCF₃, SOCH₃, SO₂CH₃, ONO₂, NO₂, N₃, NH₂, heterocycloalkyl, heterocycloalkaryl, aminoalkylamino, polyalkylamino, substituted silyl, an RNA cleaving group, a reporter group, an intercalator, a group for improving the pharmacokinetic properties of an iRNA, or a group for improving the pharmacodynamic properties of an iRNA, and other substituents having similar properties. In some embodiments, the modification includes a 2′-methoxyethoxy (2′-O—CH₂CH₂OCH₃, also known as 2′-O-(2-methoxyethyl) or 2′-MOE) (Martin et al., Helv. Chim. Acta, 1995, 78:486-504) i.e., an alkoxy-alkoxy group. Another exemplary modification is 2′-dimethylaminooxyethoxy, i.e., a O(CH₂)₂ON(CH₃)₂ group, also known as 2′-DMAOE, as described in examples herein below, and 2′-dimethylaminoethoxyethoxy (also known in the art as 2′-O-dimethylaminoethoxyethyl or 2′-DMAEOE), i.e., 2′-O—CH₂—O—CH₂—N(CH₂)₂. Further exemplary modifications include: 5′-Me-2′-F nucleotides, 5′-Me-2′-OMe nucleotides, 5′-Me-2′-deoxynucleotides, (both R and S isomers in these three families); 2′-alkoxyalkyl; and 2′-NMA (N-methylacetamide).

[0259] Other modifications include 2′-methoxy (2′-OCH₃), 2′-aminopropoxy (2′-OCH₂CH₂CH₂NH₂) and 2′-fluoro (2′-F). Similar modifications can also be made at other positions on the RNA of an iRNA, particularly the 3′ position of the sugar on the 3′ terminal nucleotide or in 2′-5′ linked dsRNAs and the 5′ position of 5′ terminal nucleotide. iRNAs can also have sugar mimetics such as cyclobutyl moieties in place of the pentofuranosyl sugar. Representative U.S. patents that teach the preparation of such modified sugar structures include, but are not limited to, U.S. Pat. Nos. 4,981,957; 5,118,800; 5,319,080; 5,359,044; 5,393,878; 5,446,137; 5,466,786; 5,514,785; 5,519,134; 5,567,811; 5,576,427; 5,591,722; 5,597,909; 5,610,300; 5,627,053; 5,639,873; 5,646,265; 5,658,873; 5,670,633; and 5,700,920, certain of which are commonly owned with the instant application. The entire contents of each of the foregoing are hereby incorporated herein by reference.

[0260] An iRNA can also include nucleobase (often referred to in the art simply as “base”) modifications or substitutions. As used herein, “unmodified” or “natural” nucleobases include the purine bases adenine (A) and guanine (G), and the pyrimidine bases thymine (T), cytosine (C) and uracil (U). Modified nucleobases include other synthetic and natural nucleobases such as deoxy-thymine (dT), 5-methylcytosine (5-me-C), 5-hydroxymethyl cytosine, xanthine, hypoxanthine, 2-aminoadenine, 6-methyl and other alkyl derivatives of adenine and guanine, 2-propyl and other alkyl derivatives of adenine and guanine, 2-thiouracil, 2-thiothymine and 2-thiocytosine, 5-halouracil and cytosine, 5-propynyl uracil and cytosine, 6-azo uracil, cytosine and thymine, 5-uracil (pseudouracil), 4-thiouracil, 8-halo, 8-amino, 8-thiol, 8-thioalkyl, 8-hydroxyl anal other 8-substituted adenines and guanines, 5-halo, particularly 5-bromo, 5-trifluoromethyl and other 5-substituted uracils and cytosines, 7-methylguanine and 7-methyladenine, 8-azaguanine and 8-azaadenine, 7-deazaguanine and 7-daazaadenine and 3-deazaguanine and 3-deazaadenine. Further nucleobases include those disclosed in U.S. Pat. No. 3,687,808, those disclosed in Modified Nucleosides in Biochemistry, Biotechnology and Medicine, Herdewijn, P. ed. Wiley-VCH, 2008; those disclosed in The Concise Encyclopedia Of Polymer Science And Engineering, pages 858-859, Kroschwitz, J. L, ed. John Wiley & Sons, 1990, these disclosed by Englisch et al., Angewandte Chemie, International Edition, 1991, 30, 613, and those disclosed by Sanghvi, Y S., Chapter 15, dsRNA Research and Applications, pages 289-302, Crooke, S. T. and Lebleu, B., Ed., CRC Press, 1993. Certain of these nucleobases are particularly useful for increasing the binding affinity of the oligomeric compounds featured in the invention. These include 5-substituted pyrimidines, 6-azapyrimidines and N-2, N-6 and 0-6 substituted purines, including 2-aminopropyladenine, 5-propynyluracil and 5-propynylcytosine. 5-methylcytosine substitutions have been shown to increase nucleic acid duplex stability by 0.6-1.2° C. (Sanghvi, Y. S., Crooke, S. T. and Lebleu, B., Eds., dsRNA Research and Applications, CRC Press, Boca Raton, 1993, pp. 276-278) and are exemplary base substitutions, even more particularly when combined with 2′-O-methoxyethyl sugar modifications.

[0261] Representative U.S. patents that teach the preparation of certain of the above noted modified nucleobases as well as other modified nucleobases include, but are not limited to, the above noted U.S. Pat. Nos. 3,687,808, 4,845,205; 5,130,30; 5,134,066; 5,175,273; 5,367,066; 5,432,272; 5,457,187; 5,459,255; 5,484,908; 5,502,177; 5,525,711; 5,552,540; 5,587,469; 5,594,121, 5,596,091; 5,614,617; 5,681,941; 5,750,692; 6,015,886; 6,147,200; 6,166,197; 6,222,025; 6,235,887; 6,380,368; 6,528,640; 6,639,062; 6,617,438; 7,045,610; 7,427,672; and 7,495,088, the entire contents of each of which are hereby incorporated herein by reference.

[0262] The RNA of an iRNA can also be modified to include one or more locked nucleic acids (LNA). A locked nucleic acid is a nucleotide having a modified ribose moiety in which the ribose moiety comprises an extra bridge connecting the 2′ and 4′ carbons. This structure effectively “locks” the ribose in the 3′-endo structural conformation. The addition of locked nucleic acids to siRNAs has been shown to increase siRNA stability in serum, and to reduce off-target effects (Elmen, J. et al., (2005) Nucleic Acids Research 33(1):439-447; Mook, O R. et al., (2007) Mol Canc Ther 6(3):833-843; Grunweller, A. et al., (2003) Nucleic Acids Research 31(12):3185-3193).

[0263] In some embodiments, the oligonucleotide of the invention comprises one or more monomers that are UNA (unlocked nucleic acid) nucleotides. UNA is unlocked acyclic nucleic acid, wherein any of the bonds of the sugar has been removed, forming an unlocked “sugar” residue. In one example, UNA also encompasses monomer with bonds between C1′-C4′ have been removed (i.e. the covalent carbon-oxygen-carbon bond between the C1′ and C4′ carbons). In another example, the C2′-C3′ bond (i.e. the covalent carbon-carbon bond between the C2′ and C3′ carbons) of the sugar has been removed (see Nuc. Acids Symp. Series, 52, 133-134 (2008) and Fluiter et al., Mol. Biosyst., 2009, 10, 1039 hereby incorporated by reference).

[0264] The RNA of an iRNA can also be modified to include one or more bicyclic sugar moities. A “bicyclic sugar” is a furanosyl ring modified by the bridging of two atoms. A“bicyclic nucleoside” (“BNA”) is a nucleoside having a sugar moiety comprising a bridge connecting two carbon atoms of the sugar ring, thereby forming a bicyclic ring system. In certain embodiments, the bridge connects the 4′-carbon and the 2′-carbon of the sugar ring. Thus, in some embodiments an agent of the invention may include one or more locked nucleic acids (LNA). A locked nucleic acid is a nucleotide having a modified ribose moiety in which the ribose moiety comprises an extra bridge connecting the 2′ and 4′ carbons. In other words, an LNA is a nucleotide comprising a bicyclic sugar moiety comprising a 4′-CH2-O-2′ bridge. This structure effectively “locks” the ribose in the 3′-endo structural conformation. The addition of locked nucleic acids to siRNAs has been shown to increase siRNA stability in serum, and to reduce off-target effects (Elmen, J. et al., (2005) Nucleic Acids Research 33(1):439-447; Mook, O R. et al., (2007)Mol Canc Ther 6(3):833-843; Grunweller, A. et al., (2003) Nucleic Acids Research 31(12):3185-3193). Examples of bicyclic nucleosides for use in the polynucleotides of the invention include without limitation nucleosides comprising a bridge between the 4′ and the 2′ ribosyl ring atoms. In certain embodiments, the antisense polynucleotide agents of the invention include one or more bicyclic nucleosides comprising a 4′ to 2′ bridge. Examples of such 4′ to 2′ bridged bicyclic nucleosides, include but are not limited to 4′-(CH₂)—O-2′ (LNA); 4′-(CH2)-S-2′; 4′-(CH₂)₂—O-2′ (ENA); 4′-CH(CH₃)O-2′ (also referred to as “constrained ethyl” or “cEt”) and 4′-CH(CH₂OCH₃)O-2′ (and analogs thereof, see, e.g., U.S. Pat. No. 7,399,845); 4′-C(CH3)(CH3)-O-2′ (and analogs thereof; see e.g., U.S. Pat. No. 8,278,283); 4′-CH₂—N(OCH₃)-2′ (and analogs thereof, see e.g., U.S. Pat. No. 8,278,425); 4′-CH₂—O—N(CH₃)-2′ (see, e.g., U.S. Patent Publication No. 2004/0171570); 4′-CH₂—N(R)—O-2′, wherein R is H, C1-C12 alkyl, or a protecting group (see, e.g., U.S. Pat. No. 7,427,672); 4′-CH₂—C(H)(CH₃)-2′ (see, e.g., Chattopadhyaya et al., J. Org. Chem., 2009, 74, 118-134); and 4′-CH₂—C(═CH₂)-2′ (and analogs thereof, see, e.g., U.S. Pat. No. 8,278,426). The entire contents of each of the foregoing are hereby incorporated herein by reference.

[0265] Additional representative U.S. patents and US patent Publications that teach the preparation of locked nucleic acid nucleotides include, but are not limited to, the following: U.S. Pat. Nos. 6,268,490; 6,525,191; 6,670,461; 6,770,748; 6,794,499; 6,998,484; 7,053,207; 7,034,133; 7,084,125; 7,399,845; 7,427,672; 7,569,686; 7,741,457; 8,022,193; 8,030,467; 8,278,425; 8,278,426; 8,278,283; US 2008/0039618; and US 2009/0012281, the entire contents of each of which are hereby incorporated herein by reference.

[0266] Any of the foregoing bicyclic nucleosides can be prepared having one or more stereochemical sugar configurations including for example α-L-ribofuranose and 3-D-ribofuranose (see WO 99/14226).

[0267] The RNA of an iRNA can also be modified to include one or more constrained ethyl nucleotides. As used herein, a “constrained ethyl nucleotide” or “cEt” is a locked nucleic acid comprising a bicyclic sugar moiety comprising a 4′-CH(CH₃)—O-2′ bridge. In one embodiment, a constrained ethyl nucleotide is in the S conformation referred to herein as “S-cEt.”

[0268] An iRNA of the invention may also include one or more “conformationally restricted nucleotides” (“CRN”). CRN are nucleotide analogs with a linker connecting the C2′ and C4′ carbons of ribose or the C3 and -C5′ carbons of ribose. CRN lock the ribose ring into a stable conformation and increase the hybridization affinity to mRNA. The linker is of sufficient length to place the oxygen in an optimal position for stability and affinity resulting in less ribose ring puckering.

[0269] Representative publications that teach the preparation of certain of the above noted CRN include, but are not limited to, US Patent Publication No. 2013/0190383; and PCT publication WO 2013/036868, the entire contents of each of which are hereby incorporated herein by reference.

[0270] One or more of the nucleotides of an iRNA of the invention may also include a hydroxymethyl substituted nucleotide. A “hydroxymethyl substituted nucleotide” is an acyclic 2′-3′-seco-nucleotide, also referred to as an “unlocked nucleic acid” (“UNA”) modification

Representative U.S. publications that teach the preparation of UNA include, but are not limited to, U.S. Pat. No. 8,314,227; and US Patent Publication Nos. 2013/0096289; 2013/0011922; and 2011/0313020, the entire contents of each of which are hereby incorporated herein by reference.

[0271] Potentially stabilizing modifications to the ends of RNA molecules can include N-(acetylaminocaproyl)-4-hydroxyprolinol (Hyp-C6-NHAc), N-(caproyl-4-hydroxyprolinol (Hyp-C6), N-(acetyl-4-hydroxyprolinol (Hyp-NHAc), thymidine-2′-O-deoxythymidine (ether), N-(aminocaproyl)-4-hydroxyprolinol (Hyp-C6-amino), 2-docosanoyl-uridine-3″-phosphate, inverted base dT(idT) and others. Disclosure of this modification can be found in PCT Publication No. WO 2011/005861.

[0272] Other modifications of the nucleotides of an iRNA of the invention include a 5′ phosphate or 5′ phosphate mimic, e.g., a 5′-terminal phosphate or phosphate mimic on the antisense strand of an RNAi agent. Suitable phosphate mimics are disclosed in, for example US Patent Publication No. 2012/0157511, the entire contents of which are incorporated herein by reference.

[0273] A. Modified iRNAs Comprising Motifs of the Invention

[0274] In certain aspects of the invention, the double-stranded RNAi agents of the invention include agents with chemical modifications as disclosed, for example, in U.S. Provisional Application No. 61/561,710, filed on Nov. 18, 2011, or in PCT/US2012/065691, filed on Nov. 16, 2012, the entire contents of each of which are incorporated herein by reference.

As shown herein and in Provisional Application No. 61/561,710 or PCT Application No. PCT/US2012/065691, a superior result may be obtained by introducing one or more motifs of three identical modifications on three consecutive nucleotides into a sense strand and/or antisense strand of an RNAi agent, particularly at or near the cleavage site. In some embodiments, the sense strand and antisense strand of the RNAi agent may otherwise be completely modified. The introduction of these motifs interrupts the modification pattern, if present, of the sense and/or antisense strand. The RNAi agent may be optionally conjugated with a GalNAc derivative ligand, for instance on the sense strand. The resulting RNAi agents present superior gene silencing activity.

[0275] More specifically, it has been surprisingly discovered that when the sense strand and antisense strand of the double-stranded RNAi agent are completely modified to have one or more motifs of three identical modifications on three consecutive nucleotides at or near the cleavage site of at least one strand of an RNAi agent, the gene silencing activity of the RNAi agent was superiorly enhanced.

[0276] Accordingly, the invention provides double-stranded RNAi agents capable of inhibiting the expression of a target gene (i.e., angiotensinogen (AGT) gene) in vivo. The RNAi agent comprises a sense strand and an antisense strand. Each strand of the RNAi agent may range from 12-30 nucleotides in length. For example, each strand may be between 14-30 nucleotides in length, 17-30 nucleotides in length, 25-30 nucleotides in length, 27-30 nucleotides in length, 17-23 nucleotides in length, 17-21 nucleotides in length, 17-19 nucleotides in length, 19-25 nucleotides in length, 19-23 nucleotides in length, 19-21 nucleotides in length, 21-25 nucleotides in length, or 21-23 nucleotides in length.

[0277] The sense strand and antisense strand typically form a duplex double-stranded RNA (“dsRNA”), also referred to herein as an “RNAi agent.” The duplex region of an RNAi agent may be 12-30 nucleotide pairs in length. For example, the duplex region can be between 14-30 nucleotide pairs in length, 17-30 nucleotide pairs in length, 27-30 nucleotide pairs in length, 17-23 nucleotide pairs in length, 17-21 nucleotide pairs in length, 17-19 nucleotide pairs in length, 19-25 nucleotide pairs in length, 19-23 nucleotide pairs in length, 19-21 nucleotide pairs in length, 21-25 nucleotide pairs in length, or 21-23 nucleotide pairs in length. In another example, the duplex region is selected from 15, 16, 17, 18, 19, 20, 21, 22, 23, 24, 25, 26, and 27 nucleotides in length.

[0278] In one embodiment, the RNAi agent may contain one or more overhang regions and/or capping groups at the 3′-end, 5′-end, or both ends of one or both strands. The overhang can be 1-6 nucleotides in length, for instance 2-6 nucleotides in length, 1-5 nucleotides in length, 2-5 nucleotides in length, 1-4 nucleotides in length, 2-4 nucleotides in length, 1-3 nucleotides in length, 2-3 nucleotides in length, or 1-2 nucleotides in length. The overhangs can be the result of one strand being longer than the other, or the result of two strands of the same length being staggered. The overhang can form a mismatch with the target mRNA or it can be complementary to the gene sequences being targeted or can be another sequence. As discussed herein, extended overhang of up to 30 nucleotides in length are also contemplated in various embodiments of the invention. The first and second strands can also be joined, e.g., by additional bases to form a hairpin, or by other non-base linkers.

[0279] In one embodiment, the nucleotides in the overhang region of the RNAi agent can each independently be a modified or unmodified nucleotide including, but no limited to 2′-sugar modified, such as, 2-F, 2′-Omethyl, thymidine (T), 2′-O-methoxyethyl-5-methyluridine (Teo), 2′-O-methoxyethyladenosine (Aeo), 2′-O-methoxyethyl-5-methylcytidine (m5Ceo), and any combinations thereof. For example, TT can be an overhang sequence for either end on either strand. The overhang can form a mismatch with the target mRNA or it can be complementary to the gene sequences being targeted or can be another sequence.

[0280] The 5′- or 3′-overhangs at the sense strand, antisense strand, or both strands of the RNAi agent may be phosphorylated. In some embodiments, the overhang region(s) contains two nucleotides having a phosphorothioate between the two nucleotides, where the two nucleotides can be the same or different. In one embodiment, the overhang is present at the 3′-end of the sense strand, antisense strand, or both strands. In one embodiment, this 3′-overhang is present in the antisense strand. In one embodiment, this 3′-overhang is present in the sense strand.

[0281] The RNAi agent may contain only a single overhang, which can strengthen the interference activity of the RNAi, without affecting its overall stability. For example, the single-stranded overhang may be located at the 3-terminal end of the sense strand or, alternatively, at the 3-terminal end of the antisense strand. The RNAi may also have a blunt end, located at the 5′-end of the antisense strand (or the 3′-end of the sense strand) or vice versa. Generally, the antisense strand of the RNAi has a nucleotide overhang at the 3′-end, and the 5′-end is blunt. While not wishing to be bound by theory, the asymmetric blunt end at the 5′-end of the antisense strand and 3′-end overhang of the antisense strand favor the guide strand loading into RISC process.

[0282] In one embodiment, the RNAi agent is a double ended bluntmer of 19 nucleotides in length, wherein the sense strand contains at least one motif of three 2′-F modifications on three consecutive nucleotides at positions 7, 8, 9 from the 5′end. The antisense strand contains at least one motif of three 2′-O-methyl modifications on three consecutive nucleotides at positions 11, 12, 13 from the 5′end.

[0283] In another embodiment, the RNAi agent is a double ended bluntmer of 20 nucleotides in length, wherein the sense strand contains at least one motif of three 2′-F modifications on three consecutive nucleotides at positions 8, 9, 10 from the 5′end. The antisense strand contains at least one motif of three 2′-O-methyl modifications on three consecutive nucleotides at positions 11, 12, 13 from the 5′end.

[0284] In yet another embodiment, the RNAi agent is a double ended bluntmer of 21 nucleotides in length, wherein the sense strand contains at least one motif of three 2′-F modifications on three consecutive nucleotides at positions 9, 10, 11 from the 5′end. The antisense strand contains at least one motif of three 2′-O-methyl modifications on three consecutive nucleotides at positions 11, 12, 13 from the 5′end.

[0285] In one embodiment, the RNAi agent comprises a 21 nucleotide sense strand and a 23 nucleotide antisense strand, wherein the sense strand contains at least one motif of three 2′-F modifications on three consecutive nucleotides at positions 9, 10, 11 from the 5′end; the antisense strand contains at least one motif of three 2′-O-methyl modifications on three consecutive nucleotides at positions 11, 12, 13 from the 5′end, wherein one end of the RNAi agent is blunt, while the other end comprises a 2 nucleotide overhang. Preferably, the 2 nucleotide overhang is at the 3′-end of the antisense strand.

[0286] When the 2 nucleotide overhang is at the 3′-end of the antisense strand, there may be two phosphorothioate internucleotide linkages between the terminal three nucleotides, wherein two of the three nucleotides are the overhang nucleotides, and the third nucleotide is a paired nucleotide next to the overhang nucleotide. In one embodiment, the RNAi agent additionally has two phosphorothioate internucleotide linkages between the terminal three nucleotides at both the 5′-end of the sense strand and at the 5′-end of the antisense strand. In one embodiment, every nucleotide in the sense strand and the antisense strand of the RNAi agent, including the nucleotides that are part of the motifs are modified nucleotides. In one embodiment each residue is independently modified with a 2′-O-methyl or 3′-fluoro, e.g., in an alternating motif. Optionally, the RNAi agent further comprises a ligand (preferably GalNAc₃).

[0287] In one embodiment, the RNAi agent comprises a sense and an antisense strand, wherein the sense strand is 25-30 nucleotide residues in length, wherein starting from the 5′ terminal nucleotide (position 1) positions 1 to 23 of the first strand comprise at least 8 ribonucleotides; the antisense strand is 36-66 nucleotide residues in length and, starting from the 3′ terminal nucleotide, comprises at least 8 ribonucleotides in the positions paired with positions 1-23 of sense strand to form a duplex; wherein at least the 3′ terminal nucleotide of antisense strand is unpaired with sense strand, and up to 6 consecutive 3′ terminal nucleotides are unpaired with sense strand, thereby forming a 3′ single stranded overhang of 1-6 nucleotides; wherein the 5′ terminus of antisense strand comprises from 10-30 consecutive nucleotides which are unpaired with sense strand, thereby forming a 10-30 nucleotide single stranded 5′ overhang; wherein at least the sense strand 5′ terminal and 3′ terminal nucleotides are base paired with nucleotides of antisense strand when sense and antisense strands are aligned for maximum complementarity, thereby forming a substantially duplexed region between sense and antisense strands; and antisense strand is sufficiently complementary to a target RNA along at least 19 ribonucleotides of antisense strand length to reduce target gene expression when the double-stranded nucleic acid is introduced into a mammalian cell; and wherein the sense strand contains at least one motif of three 2′-F modifications on three consecutive nucleotides, where at least one of the motifs occurs at or near the cleavage site. The antisense strand contains at least one motif of three 2′-O-methyl modifications on three consecutive nucleotides at or near the cleavage site.

[0288] In one embodiment, the RNAi agent comprises sense and antisense strands, wherein the RNAi agent comprises a first strand having a length which is at least 25 and at most 29 nucleotides and a second strand having a length which is at most 30 nucleotides with at least one motif of three 2′-O-methyl modifications on three consecutive nucleotides at position 11, 12, 13 from the 5′ end; wherein the 3′ end of the first strand and the 5′ end of the second strand form a blunt end and the second strand is 1-4 nucleotides longer at its 3′ end than the first strand, wherein the duplex region which is at least 25 nucleotides in length, and the second strand is sufficiently complementary to a target mRNA along at least 19 nucleotide of the second strand length to reduce target gene expression when the RNAi agent is introduced into a mammalian cell, and wherein dicer cleavage of the RNAi agent preferentially results in an siRNA comprising the 3′ end of the second strand, thereby reducing expression of the target gene in the mammal. Optionally, the RNAi agent further comprises a ligand.

[0289] In one embodiment, the sense strand of the RNAi agent contains at least one motif of three identical modifications on three consecutive nucleotides, where one of the motifs occurs at the cleavage site in the sense strand.

[0290] In one embodiment, the antisense strand of the RNAi agent can also contain at least one motif of three identical modifications on three consecutive nucleotides, where one of the motifs occurs at or near the cleavage site in the antisense strand

[0291] For an RNAi agent having a duplex region of 17-23 nucleotide in length, the cleavage site of the antisense strand is typically around the 10, 11 and 12 positions from the 5′-end. Thus the motifs of three identical modifications may occur at the 9, 10, 11 positions; 10, 11, 12 positions; 11, 12, 13 positions; 12, 13, 14 positions; or 13, 14, 15 positions of the antisense strand, the count starting from the 1^{st} nucleotide from the 5′-end of the antisense strand, or, the count starting from the 1^{st} paired nucleotide within the duplex region from the 5′-end of the antisense strand. The cleavage site in the antisense strand may also change according to the length of the duplex region of the RNAi from the 5′-end.

[0292] The sense strand of the RNAi agent may contain at least one motif of three identical modifications on three consecutive nucleotides at the cleavage site of the strand; and the antisense strand may have at least one motif of three identical modifications on three consecutive nucleotides at or near the cleavage site of the strand. When the sense strand and the antisense strand form a dsRNA duplex, the sense strand and the antisense strand can be so aligned that one motif of the three nucleotides on the sense strand and one motif of the three nucleotides on the antisense strand have at least one nucleotide overlap, i.e., at least one of the three nucleotides of the motif in the sense strand forms a base pair with at least one of the three nucleotides of the motif in the antisense strand. Alternatively, at least two nucleotides may overlap, or all three nucleotides may overlap.

[0293] In one embodiment, the sense strand of the RNAi agent may contain more than one motif of three identical modifications on three consecutive nucleotides. The first motif may occur at or near the cleavage site of the strand and the other motifs may be a wing modification. The term “wing modification” herein refers to a motif occurring at another portion of the strand that is separated from the motif at or near the cleavage site of the same strand. The wing modification is either adjacent to the first motif or is separated by at least one or more nucleotides. When the motifs are immediately adjacent to each other then the chemistry of the motifs are distinct from each other and when the motifs are separated by one or more nucleotide than the chemistries can be the same or different. Two or more wing modifications may be present. For instance, when two wing modifications are present, each wing modification may occur at one end relative to the first motif which is at or near cleavage site or on either side of the lead motif.

[0294] Like the sense strand, the antisense strand of the RNAi agent may contain more than one motifs of three identical modifications on three consecutive nucleotides, with at least one of the motifs occurring at or near the cleavage site of the strand. This antisense strand may also contain one or more wing modifications in an alignment similar to the wing modifications that may be present on the sense strand.

[0295] In one embodiment, the wing modification on the sense strand or antisense strand of the RNAi agent typically does not include the first one or two terminal nucleotides at the 3′-end, 5′-end or both ends of the strand.

[0296] In another embodiment, the wing modification on the sense strand or antisense strand of the RNAi agent typically does not include the first one or two paired nucleotides within the duplex region at the 3′-end, 5′-end or both ends of the strand.

[0297] When the sense strand and the antisense strand of the RNAi agent each contain at least one wing modification, the wing modifications may fall on the same end of the duplex region, and have an overlap of one, two or three nucleotides.

[0298] When the sense strand and the antisense strand of the RNAi agent each contain at least two wing modifications, the sense strand and the antisense strand can be so aligned that two modifications each from one strand fall on one end of the duplex region, having an overlap of one, two or three nucleotides; two modifications each from one strand fall on the other end of the duplex region, having an overlap of one, two, or three nucleotides; two modifications one strand fall on each side of the lead motif, having an overlap of one, two or three nucleotides in the duplex region.

[0299] In one embodiment, every nucleotide in the sense strand and antisense strand of the RNAi agent, including the nucleotides that are part of the motifs, may be modified. Each nucleotide may be modified with the same or different modification which can include one or more alteration of one or both of the non-linking phosphate oxygens and/or of one or more of the linking phosphate oxygens; alteration of a constituent of the ribose sugar, e.g., of the 2′ hydroxyl on the ribose sugar; wholesale replacement of the phosphate moiety with “dephospho” linkers; modification or replacement of a naturally occurring base; and replacement or modification of the ribose-phosphate backbone.

[0300] As nucleic acids are polymers of subunits, many of the modifications occur at a position which is repeated within a nucleic acid, e.g., a modification of a base, or a phosphate moiety, or a non-linking O of a phosphate moiety. In some cases the modification will occur at all of the subject positions in the nucleic acid but in many cases it will not. By way of example, a modification may only occur at a 3′ or 5′ terminal position, may only occur in a terminal region, e.g., at a position on a terminal nucleotide or in the last 2, 3, 4, 5, or 10 nucleotides of a strand. A modification may occur in a double strand region, a single strand region, or in both. A modification may occur only in the double strand region of a RNA or may only occur in a single strand region of a RNA. For example, a phosphorothioate modification at a non-linking O position may only occur at one or both termini, may only occur in a terminal region, e.g., at a position on a terminal nucleotide or in the last 2, 3, 4, 5, or 10 nucleotides of a strand, or may occur in double strand and single strand regions, particularly at termini. The 5′ end or ends can be phosphorylated.

[0301] It may be possible, e.g., to enhance stability, to include particular bases in overhangs, or to include modified nucleotides or nucleotide surrogates, in single strand overhangs, e.g., in a 5′ or 3′ overhang, or in both. For example, it can be desirable to include purine nucleotides in overhangs. In some embodiments all or some of the bases in a 3′ or 5′ overhang may be modified, e.g., with a modification described herein. Modifications can include, e.g., the use of modifications at the 2′ position of the ribose sugar with modifications that are known in the art, e.g., the use of deoxyribonucleotides, 2′-deoxy-2′-fluoro (2′-F) or 2′-O-methyl modified instead of the ribosugar of the nucleobase, and modifications in the phosphate group, e.g., phosphorothioate modifications. Overhangs need not be homologous with the target sequence.

[0302] In one embodiment, each residue of the sense strand and antisense strand is independently modified with LNA, CRN, cET, UNA, HNA, CeNA, 2′-methoxyethyl, 2′-O-methyl, 2′-O-allyl, 2′-C-allyl, 2′-deoxy, 2′-hydroxyl, or 2′-fluoro. The strands can contain more than one modification. In one embodiment, each residue of the sense strand and antisense strand is independently modified with 2′-O-methyl or 2′-fluoro.

[0303] At least two different modifications are typically present on the sense strand and antisense strand. Those two modifications may be the 2′-O-methyl or 2′-fluoro modifications, or others.

[0304] In one embodiment, the Nₐ and/or N_{b} comprise modifications of an alternating pattern. The term “alternating motif” as used herein refers to a motif having one or more modifications, each modification occurring on alternating nucleotides of one strand. The alternating nucleotide may refer to one per every other nucleotide or one per every three nucleotides, or a similar pattern. For example, if A, B and C each represent one type of modification to the nucleotide, the alternating motif can be “ABABABABABAB . . . ,” “AABBAABBAABB . . . ,” “AABAABAABAAB . . . ,” “AAABAAABAAAB . . . ,” “AAABBBAAABBB . . . ,” or “ABCABCABCABC . . . ,” etc.

[0305] The type of modifications contained in the alternating motif may be the same or different. For example, if A, B, C, D each represent one type of modification on the nucleotide, the alternating pattern, i.e., modifications on every other nucleotide, may be the same, but each of the sense strand or antisense strand can be selected from several possibilities of modifications within the alternating motif such as “ABABAB . . . ” “ACACAC . . . ” “BDBDBD . . . ” or “CDCDCD . . . ,” etc.

[0306] In one embodiment, the RNAi agent of the invention comprises the modification pattern for the alternating motif on the sense strand relative to the modification pattern for the alternating motif on the antisense strand is shifted. The shift may be such that the modified group of nucleotides of the sense strand corresponds to a differently modified group of nucleotides of the antisense strand and vice versa. For example, the sense strand when paired with the antisense strand in the dsRNA duplex, the alternating motif in the sense strand may start with “ABABAB” from 5′-3′ of the strand and the alternating motif in the antisense strand may start with “BABABA” from 5′-3′ of the strand within the duplex region. As another example, the alternating motif in the sense strand may start with “AABBAABB” from 5′-3′ of the strand and the alternating motif in the antisenese strand may start with “BBAABBAA” from 5′-3′ of the strand within the duplex region, so that there is a complete or partial shift of the modification patterns between the sense strand and the antisense strand.

[0307] In one embodiment, the RNAi agent comprises the pattern of the alternating motif of 2′-O-methyl modification and 2′-F modification on the sense strand initially has a shift relative to the pattern of the alternating motif of 2′-O-methyl modification and 2′-F modification on the antisense strand initially, i.e., the 2′-O-methyl modified nucleotide on the sense strand base pairs with a 2′-F modified nucleotide on the antisense strand and vice versa. The 1 position of the sense strand may start with the 2′-F modification, and the 1 position of the antisense strand may start with the 2′-O-methyl modification.

[0308] The introduction of one or more motifs of three identical modifications on three consecutive nucleotides to the sense strand and/or antisense strand interrupts the initial modification pattern present in the sense strand and/or antisense strand. This interruption of the modification pattern of the sense and/or antisense strand by introducing one or more motifs of three identical modifications on three consecutive nucleotides to the sense and/or antisense strand surprisingly enhances the gene silencing activity to the target gene.

[0309] In one embodiment, when the motif of three identical modifications on three consecutive nucleotides is introduced to any of the strands, the modification of the nucleotide next to the motif is a different modification than the modification of the motif For example, the portion of the sequence containing the motif is “ . . . NₐYYYN_{b} . . . ,” where “Y” represents the modification of the motif of three identical modifications on three consecutive nucleotide, and “Nₐ” and “N_{b}” represent a modification to the nucleotide next to the motif “YYY” that is different than the modification of Y, and where Nₐ and N_{b} can be the same or different modifications. Alternatively, Nₐ and/or N_{b} may be present or absent when there is a wing modification present.

[0310] The RNAi agent may further comprise at least one phosphorothioate or methylphosphonate internucleotide linkage. The phosphorothioate or methylphosphonate internucleotide linkage modification may occur on any nucleotide of the sense strand or antisense strand or both strands in any position of the strand. For instance, the internucleotide linkage modification may occur on every nucleotide on the sense strand and/or antisense strand; each internucleotide linkage modification may occur in an alternating pattern on the sense strand and/or antisense strand; or the sense strand or antisense strand may contain both internucleotide linkage modifications in an alternating pattern. The alternating pattern of the internucleotide linkage modification on the sense strand may be the same or different from the antisense strand, and the alternating pattern of the internucleotide linkage modification on the sense strand may have a shift relative to the alternating pattern of the internucleotide linkage modification on the antisense strand. In one embodiment, a double-stranded RNAi agent comprises 6-8 phosphorothioate internucleotide linkages. In one embodiment, the antisense strand comprises two phosphorothioate internucleotide linkages at the 5′-terminus and two phosphorothioate internucleotide linkages at the 3′-terminus, and the sense strand comprises at least two phosphorothioate internucleotide linkages at either the 5′-terminus or the 3′-terminus.

[0311] In one embodiment, the RNAi comprises a phosphorothioate or methylphosphonate internucleotide linkage modification in the overhang region. For example, the overhang region may contain two nucleotides having a phosphorothioate or methylphosphonate internucleotide linkage between the two nucleotides. Internucleotide linkage modifications also may be made to link the overhang nucleotides with the terminal paired nucleotides within the duplex region. For example, at least 2, 3, 4, or all the overhang nucleotides may be linked through phosphorothioate or methylphosphonate internucleotide linkage, and optionally, there may be additional phosphorothioate or methylphosphonate internucleotide linkages linking the overhang nucleotide with a paired nucleotide that is next to the overhang nucleotide. For instance, there may be at least two phosphorothioate internucleotide linkages between the terminal three nucleotides, in which two of the three nucleotides are overhang nucleotides, and the third is a paired nucleotide next to the overhang nucleotide. These terminal three nucleotides may be at the 3′-end of the antisense strand, the 3′-end of the sense strand, the 5′-end of the antisense strand, and/or the 5′end of the antisense strand.

[0312] In one embodiment, the 2 nucleotide overhang is at the 3′-end of the antisense strand, and there are two phosphorothioate internucleotide linkages between the terminal three nucleotides, wherein two of the three nucleotides are the overhang nucleotides, and the third nucleotide is a paired nucleotide next to the overhang nucleotide. Optionally, the RNAi agent may additionally have two phosphorothioate internucleotide linkages between the terminal three nucleotides at both the 5′-end of the sense strand and at the 5′-end of the antisense strand.

[0313] In one embodiment, the RNAi agent comprises mismatch(es) with the target, within the duplex, or combinations thereof. The mismatch may occur in the overhang region or the duplex region. The base pair may be ranked on the basis of their propensity to promote dissociation or melting (e.g., on the free energy of association or dissociation of a particular pairing, the simplest approach is to examine the pairs on an individual pair basis, though next neighbor or similar analysis can also be used). In terms of promoting dissociation: A:U is preferred over G:C; G:U is preferred over G:C; and I:C is preferred over G:C (I=inosine). Mismatches, e.g., non-canonical or other than canonical pairings (as described elsewhere herein) are preferred over canonical (A:T, A:U, G:C) pairings; and pairings which include a universal base are preferred over canonical pairings.

[0314] In one embodiment, the RNAi agent comprises at least one of the first 1, 2, 3, 4, or 5 base pairs within the duplex regions from the 5′-end of the antisense strand independently selected from the group of: A:U, G:U, I:C, and mismatched pairs, e.g., non-canonical or other than canonical pairings or pairings which include a universal base, to promote the dissociation of the antisense strand at the 5′-end of the duplex.

[0315] In one embodiment, the nucleotide at the 1 position within the duplex region from the 5′-end in the antisense strand is selected from the group consisting of A, dA, dU, U, and dT. Alternatively, at least one of the first 1, 2 or 3 base pair within the duplex region from the 5′-end of the antisense strand is an AU base pair. For example, the first base pair within the duplex region from the 5′-end of the antisense strand is an AU base pair.

[0316] In another embodiment, the nucleotide at the 3′-end of the sense strand is deoxy-thymine (dT). In another embodiment, the nucleotide at the 3′-end of the antisense strand is deoxy-thymine (dT). In one embodiment, there is a short sequence of deoxy-thymine nucleotides, for example, two dT nucleotides on the 3′-end of the sense and/or antisense strand.

[0317] In one embodiment, the sense strand sequence may be represented by formula (I):

5′nₚ-Nₐ-(XXX)ᵢ-N_{b}-YYY-N_{b}-(ZZZ)ⱼ-Nₐ-n_{q}3′ (I)

[0318] wherein:

[0319] i and j are each independently 0 or 1;

[0320] p and q are each independently 0-6;

[0321] each Nₐ independently represents an oligonucleotide sequence comprising 0-25 modified nucleotides, each sequence comprising at least two differently modified nucleotides;

[0322] each N_{b} independently represents an oligonucleotide sequence comprising 0-10 modified nucleotides;

[0323] each nₚ and n_{q} independently represent an overhang nucleotide;

[0324] wherein N_{b} and Y do not have the same modification; and

[0325] XXX, YYY and ZZZ each independently represent one motif of three identical modifications on three consecutive nucleotides. Preferably YYY is all 2′-F modified nucleotides.

[0326] In one embodiment, the Nₐ and/or N_{b} comprise modifications of alternating pattern.

[0327] In one embodiment, the YYY motif occurs at or near the cleavage site of the sense strand. For example, when the RNAi agent has a duplex region of 17-23 nucleotides in length, the YYY motif can occur at or the vicinity of the cleavage site (e.g.: can occur at positions 6, 7, 8, 7, 8, 9, 8, 9, 10, 9, 10, 11, 10, 11, 12 or 11, 12, 13) of—the sense strand, the count starting from the 1^{st} nucleotide, from the 5′-end; or optionally, the count starting at the 1^{st} paired nucleotide within the duplex region, from the 5′-end.

[0328] In one embodiment, i is 1 and j is 0, or i is 0 and j is 1, or both i and j are 1. The sense strand can therefore be represented by the following formulas:

5′nₚ-Nₐ—YYY-N_{b}-ZZZ-Nₐ-n_{q}3′ (Ib);

5′nₚ-Nₐ-XXX-N_{b}-YYY-Nₐ-n_{q}3′ (Ic); or

5′nₚ-Nₐ-XXX-N_{b}-YYY-N_{b}-ZZZ-Nₐ-n_{q}3′ (Id).

[0329] When the sense strand is represented by formula (Ib), N_{b} represents an oligonucleotide sequence comprising 0-10, 0-7, 0-5, 0-4, 0-2 or 0 modified nucleotides. Each Nₐ independently can represent an oligonucleotide sequence comprising 2-20, 2-15, or 2-10 modified nucleotides.

[0330] When the sense strand is represented as formula (Ic), N_{b} represents an oligonucleotide sequence comprising 0-10, 0-7, 0-10, 0-7, 0-5, 0-4, 0-2 or 0 modified nucleotides. Each Nₐ can independently represent an oligonucleotide sequence comprising 2-20, 2-15, or 2-10 modified nucleotides.

[0331] When the sense strand is represented as formula (Id), each N_{b} independently represents an oligonucleotide sequence comprising 0-10, 0-7, 0-5, 0-4, 0-2 or 0 modified nucleotides. Preferably, N_{b} is 0, 1, 2, 3, 4, 5 or 6 Each Nₐ can independently represent an oligonucleotide sequence comprising 2-20, 2-15, or 2-10 modified nucleotides. Each of X, Y and Z may be the same or different from each other.

[0332] In other embodiments, i is 0 and j is 0, and the sense strand may be represented by the formula:

5′nₚ-Nₐ-YYY-Nₐ-n_{q}3′ (Ia).

[0333] When the sense strand is represented by formula (Ia), each Nₐ independently can represent an oligonucleotide sequence comprising 2-20, 2-15, or 2-10 modified nucleotides.

[0334] In one embodiment, the antisense strand sequence of the RNAi may be represented by formula (II):

5′n_{q}′-Nₐ′-(Z′Z′Z′)ₖ-N_{b}′-Y′Y′Y′-N_{b}′-(X′X′X′)ₗ-N′ₐ-nₚ′3′ (II)

[0335] wherein:

[0336] k and l are each independently 0 or 1;

[0337] p′ and q′ are each independently 0-6;

[0338] each Nₐ′ independently represents an oligonucleotide sequence comprising 0-25 modified nucleotides, each sequence comprising at least two differently modified nucleotides;

[0339] each N_{b}′ independently represents an oligonucleotide sequence comprising 0-10 modified nucleotides;

[0340] each nₚ′ and n_{q}′ independently represent an overhang nucleotide;

[0341] wherein N_{b}′ and Y′ do not have the same modification; and

[0342] X′X′X′, Y′Y′Y′ and Z′Z′Z′ each independently represent one motif of three identical modifications on three consecutive nucleotides.

[0343] In one embodiment, the Nₐ′ and/or N_{b}′ comprise modifications of alternating pattern.

[0344] The Y′Y′Y′ motif occurs at or near the cleavage site of the antisense strand. For example, when the RNAi agent has a duplex region of 17-23 nucleotide in length, the Y′Y′Y′ motif can occur at positions 9, 10, 11; 10, 11, 12; 11, 12, 13; 12, 13, 14; or 13, 14, 15 of the antisense strand, with the count starting from the 1^{st} nucleotide, from the 5′-end; or optionally, the count starting at the 1^{st} paired nucleotide within the duplex region, from the 5′-end. Preferably, the Y′Y′Y′ motif occurs at positions 11, 12, 13.

[0345] In one embodiment, Y′Y′Y′ motif is all 2′-OMe modified nucleotides.

[0346] In one embodiment, k is 1 and l is 0, or k is 0 and l is 1, or both k and l are 1.

[0347] The antisense strand can therefore be represented by the following formulas:

5′n_{q′}-Nₐ′-Z′Z′Z′-N_{b}′-Y′Y′Y′-Nₐ′-n_{p′}3′ (IIb);

5′n_{q′}-Nₐ′-Y′Y′Y′-N_{b}′-X′X′X′-n_{p′}3′ (IIc); or

5′n_{q′}-Nₐ′-Z′Z′Z′-N_{b}′-Y′Y′Y′-N_{b}′-X′X′X′-Nₐ′-n_{p′}3′ (IId).

[0348] When the antisense strand is represented by formula (IIb), N_{b}′ represents an oligonucleotide sequence comprising 0-10, 0-7, 0-10, 0-7, 0-5, 0-4, 0-2 or 0 modified nucleotides. Each Nₐ′ independently represents an oligonucleotide sequence comprising 2-20, 2-15, or 2-10 modified nucleotides.

[0349] When the antisense strand is represented as formula (IIc), N_{b}′ represents an oligonucleotide sequence comprising 0-10, 0-7, 0-10, 0-7, 0-5, 0-4, 0-2 or 0 modified nucleotides. Each Nₐ′ independently represents an oligonucleotide sequence comprising 2-20, 2-15, or 2-10 modified nucleotides.

[0350] When the antisense strand is represented as formula (IId), each N_{b}′ independently represents an oligonucleotide sequence comprising 0-10, 0-7, 0-10, 0-7, 0-5, 0-4, 0-2 or 0 modified nucleotides. Each Nₐ′ independently represents an oligonucleotide sequence comprising 2-20, 2-15, or 2-10 modified nucleotides. Preferably, N_{b} is 0, 1, 2, 3, 4, 5 or 6.

[0351] In other embodiments, k is 0 and 1 is 0 and the antisense strand may be represented by the formula:

5′n_{p′}-N_{a′}-Y′Y′Y′-N_{a′}-n_{q′}3′ (Ia).

[0352] When the antisense strand is represented as formula (IIa), each Nₐ′ independently represents an oligonucleotide sequence comprising 2-20, 2-15, or 2-10 modified nucleotides. Each of X′, Y′ and Z′ may be the same or different from each other.

Each nucleotide of the sense strand and antisense strand may be independently modified with LNA, CRN, UNA, cEt, HNA, CeNA, 2′-methoxyethyl, 2′-O-methyl, 2′-O-allyl, 2′-C-allyl, 2′-hydroxyl, or 2′-fluoro. For example, each nucleotide of the sense strand and antisense strand is independently modified with 2′-O-methyl or 2′-fluoro. Each X, Y, Z, X′, Y′ and Z′, in particular, may represent a 2′-O-methyl modification or a 2′-fluoro modification.

[0353] In one embodiment, the sense strand of the RNAi agent may contain YYY motif occurring at 9, 10 and 11 positions of the strand when the duplex region is 21 nt, the count starting from the 1^{st} nucleotide from the 5′-end, or optionally, the count starting at the 1^{st} paired nucleotide within the duplex region, from the 5′-end; and Y represents 2′-F modification. The sense strand may additionally contain XXX motif or ZZZ motifs as wing modifications at the opposite end of the duplex region; and XXX and ZZZ each independently represents a 2′-OMe modification or 2′-F modification.

[0354] In one embodiment the antisense strand may contain Y′Y′Y′ motif occurring at positions 11, 12, 13 of the strand, the count starting from the 1^{st} nucleotide from the 5′-end, or optionally, the count starting at the 1^{st} paired nucleotide within the duplex region, from the 5′-end; and Y′ represents 2′-O-methyl modification. The antisense strand may additionally contain X′X′X′ motif or Z′Z′Z′ motifs as wing modifications at the opposite end of the duplex region; and X′X′X′ and Z′Z′Z′ each independently represents a 2′-OMe modification or 2′-F modification.

The sense strand represented by any one of the above formulas (Ia), (Ib), (Ic), and (Id) forms a duplex with a antisense strand being represented by any one of formulas (IIa), (IIb), (IIc), and (IId), respectively.

[0355] Accordingly, the RNAi agents for use in the methods of the invention may comprise a sense strand and an antisense strand, each strand having 14 to 30 nucleotides, the RNAi duplex represented by formula (III):

sense: 5′nₚ-Nₐ-(XXX)ᵢ-N_{b}-YYY-N_{b}-(ZZZ)ⱼ-Nₐ-n_{q}3′

antisense: 3′nₚ′-Nₐ′-(X′X′X′)ₖ-N_{b}′-Y′Y′Y′-N_{b}′-(Z′Z′Z′)ₗ-Nₐ′-n_{q}′5′ (III)

[0356] wherein:

[0357] i, j, k, and l are each independently 0 or 1;

[0358] p, p′, q, and q′ are each independently 0-6;

[0359] each Nₐ and Nₐ′ independently represents an oligonucleotide sequence comprising 0-25 modified nucleotides, each sequence comprising at least two differently modified nucleotides;

[0360] each N_{b} and N_{b}′ independently represents an oligonucleotide sequence comprising 0-10 modified nucleotides;

[0361] wherein each nₚ′, nₚ, n_{q}′, and n_{q}, each of which may or may not be present, independently represents an overhang nucleotide; and

[0362] XXX, YYY, ZZZ, X′X′X′, Y′Y′Y′, and Z′Z′Z′ each independently represent one motif of three identical modifications on three consecutive nucleotides.

[0363] In one embodiment, i is 0 and j is 0; or i is 1 and j is 0; or i is 0 and j is 1; or both i and j are 0; or both i and j are 1. In another embodiment, k is 0 and 1 is 0; or k is 1 and 1 is 0; k is 0 and 1 is 1; or both k and 1 are 0; or both k and 1 are 1.

[0364] Exemplary combinations of the sense strand and antisense strand forming a RNAi duplex include the formulas below:

5′nₚ-Nₐ-YYY-Nₐ-n_{q}3′

3′nₚ′-Nₐ′-Y′Y′Y′-Nₐ′n_{q}′5′ (IIIa)

5′nₚ-Nₐ-YYY-N_{b}-ZZZ-Nₐ-n_{q}3′

3′nₚ′-Nₐ′-Y′Y′Y′-N_{b}′-Z′Z′Z′-Nₐ′n_{q}′5′ (IIIb)

5′nₚ-Nₐ-XXX-N_{b}-YYY-Nₐ-n_{q}3′

3′nₚ′-Nₐ′-X′X′X′-N_{b}′-Y′Y′Y′-Nₐ′-n_{q}′5′ (IIIc)

5′nₚ-Nₐ-XXX-N_{b}-YYY-N_{b}-ZZZ-Nₐ-n_{q}3′

3′nₚ′-Nₐ′-X′X′X′-N_{b}′-Y′Y′Y′-N_{b}′-Z′Z′Z′-Nₐ-n_{q}5′ (IIId)

[0365] When the RNAi agent is represented by formula (IIIa), each Nₐ independently represents an oligonucleotide sequence comprising 2-20, 2-15, or 2-10 modified nucleotides.

[0366] When the RNAi agent is represented by formula (IIIb), each N_{b} independently represents an oligonucleotide sequence comprising 1-10, 1-7, 1-5 or 1-4 modified nucleotides. Each Nₐ independently represents an oligonucleotide sequence comprising 2-20, 2-15, or 2-10 modified nucleotides.

[0367] When the RNAi agent is represented as formula (IIIc), each N_{b}, N_{b}′ independently represents an oligonucleotide sequence comprising 0-10, 0-7, 0-10, 0-7, 0-5, 0-4, 0-2 or 0 modified nucleotides. Each Nₐ independently represents an oligonucleotide sequence comprising 2-20, 2-15, or 2-10 modified nucleotides.

[0368] When the RNAi agent is represented as formula (IIId), each N_{b}, N_{b}′ independently represents an oligonucleotide sequence comprising 0-10, 0-7, 0-10, 0-7, 0-5, 0-4, 0-2 or 0 modified nucleotides. Each Nₐ, Nₐ′ independently represents an oligonucleotide sequence comprising 2-20, 2-15, or 2-10 modified nucleotides. Each of Nₐ, Nₐ′, N_{b} and N_{b}′ independently comprises modifications of alternating pattern.

[0369] Each of X, Y and Z in formulas (III), (IIIa), (IIIb), (IIIc), and (IIId) may be the same or different from each other.

[0370] When the RNAi agent is represented by formula (III), (IIIa), (IIIb), (IIIc), and (IIId), at least one of the Y nucleotides may form a base pair with one of the Y′ nucleotides. Alternatively, at least two of the Y nucleotides form base pairs with the corresponding Y′ nucleotides; or all three of the Y nucleotides all form base pairs with the corresponding Y′ nucleotides.

[0371] When the RNAi agent is represented by formula (IIIb) or (IIId), at least one of the Z nucleotides may form a base pair with one of the Z′ nucleotides. Alternatively, at least two of the Z nucleotides form base pairs with the corresponding Z′ nucleotides; or all three of the Z nucleotides all form base pairs with the corresponding Z′ nucleotides.

[0372] When the RNAi agent is represented as formula (IIIc) or (IIId), at least one of the X nucleotides may form a base pair with one of the X′ nucleotides. Alternatively, at least two of the X nucleotides form base pairs with the corresponding X′ nucleotides; or all three of the X nucleotides all form base pairs with the corresponding X′ nucleotides.

[0373] In one embodiment, the modification on the Y nucleotide is different than the modification on the Y′ nucleotide, the modification on the Z nucleotide is different than the modification on the Z′ nucleotide, and/or the modification on the X nucleotide is different than the modification on the X′ nucleotide.

[0374] In one embodiment, when the RNAi agent is represented by formula (IIId), the Nₐ modifications are 2′-O-methyl or 2′-fluoro modifications. In another embodiment, when the RNAi agent is represented by formula (IIId), the Nₐ modifications are 2′-O-methyl or 2′-fluoro modifications and nₚ′>0 and at least one nₚ′ is linked to a neighboring nucleotide a via phosphorothioate linkage. In yet another embodiment, when the RNAi agent is represented by formula (IIId), the Nₐ modifications are 2′-O-methyl or 2′-fluoro modifications, nₚ′>0 and at least one nₚ′ is linked to a neighboring nucleotide via phosphorothioate linkage, and the sense strand is conjugated to one or more GalNAc derivatives attached through a bivalent or trivalent branched linker (described below). In another embodiment, when the RNAi agent is represented by formula (IIId), the Nₐ modifications are 2′-O-methyl or 2′-fluoro modifications, nₚ′>0 and at least one nₚ′ is linked to a neighboring nucleotide via phosphorothioate linkage, the sense strand comprises at least one phosphorothioate linkage, and the sense strand is conjugated to one or more GalNAc derivatives attached through a bivalent or trivalent branched linker.

[0375] In one embodiment, when the RNAi agent is represented by formula (IIIa), the Nₐ modifications are 2′-O-methyl or 2′-fluoro modifications, nₚ′>0 and at least one nₚ′ is linked to a neighboring nucleotide via phosphorothioate linkage, the sense strand comprises at least one phosphorothioate linkage, and the sense strand is conjugated to one or more GalNAc derivatives attached through a bivalent or trivalent branched linker.

[0376] In one embodiment, the RNAi agent is a multimer containing at least two duplexes represented by formula (III), (IIIa), (IIIb), (IIIc), and (IIId), wherein the duplexes are connected by a linker. The linker can be cleavable or non-cleavable. Optionally, the multimer further comprises a ligand. Each of the duplexes can target the same gene or two different genes; or each of the duplexes can target same gene at two different target sites.

[0377] In one embodiment, the RNAi agent is a multimer containing three, four, five, six or more duplexes represented by formula (III), (IIIa), (IIIb), (IIIc), and (IIId), wherein the duplexes are connected by a linker. The linker can be cleavable or non-cleavable. Optionally, the multimer further comprises a ligand. Each of the duplexes can target the same gene or two different genes; or each of the duplexes can target same gene at two different target sites.

[0378] In one embodiment, two RNAi agents represented by formula (III), (IIIa), (IIIb), (IIIc), and (IIId) are linked to each other at the 5′ end, and one or both of the 3′ ends and are optionally conjugated to a ligand. Each of the agents can target the same gene or two different genes; or each of the agents can target same gene at two different target sites.

[0379] Various publications describe multimeric RNAi agents that can be used in the methods of the invention. Such publications include WO2007/091269, U.S. Pat. No. 7,858,769, WO2010/141511, WO2007/117686, WO2009/014887 and WO2011/031520 the entire contents of each of which are hereby incorporated herein by reference.

[0380] As described in more detail below, the RNAi agent that contains conjugations of one or more carbohydrate moieties to a RNAi agent can optimize one or more properties of the RNAi agent. In many cases, the carbohydrate moiety will be attached to a modified subunit of the RNAi agent. For example, the ribose sugar of one or more ribonucleotide subunits of a dsRNA agent can be replaced with another moiety, e.g., a non-carbohydrate (preferably cyclic) carrier to which is attached a carbohydrate ligand. A ribonucleotide subunit in which the ribose sugar of the subunit has been so replaced is referred to herein as a ribose replacement modification subunit (RRMS). A cyclic carrier may be a carbocyclic ring system, i.e., all ring atoms are carbon atoms, or a heterocyclic ring system, i.e., one or more ring atoms may be a heteroatom, e.g., nitrogen, oxygen, sulfur. The cyclic carrier may be a monocyclic ring system, or may contain two or more rings, e.g. fused rings. The cyclic carrier may be a fully saturated ring system, or it may contain one or more double bonds.

[0381] The ligand may be attached to the polynucleotide via a carrier. The carriers include (i) at least one “backbone attachment point,” preferably two “backbone attachment points” and (ii) at least one “tethering attachment point.” A “backbone attachment point” as used herein refers to a functional group, e.g. a hydroxyl group, or generally, a bond available for, and that is suitable for incorporation of the carrier into the backbone, e.g., the phosphate, or modified phosphate, e.g., sulfur containing, backbone, of a ribonucleic acid. A “tethering attachment point” (TAP) in some embodiments refers to a constituent ring atom of the cyclic carrier, e.g., a carbon atom or a heteroatom (distinct from an atom which provides a backbone attachment point), that connects a selected moiety. The moiety can be, e.g., a carbohydrate, e.g. monosaccharide, disaccharide, trisaccharide, tetrasaccharide, oligosaccharide and polysaccharide. Optionally, the selected moiety is connected by an intervening tether to the cyclic carrier. Thus, the cyclic carrier will often include a functional group, e.g., an amino group, or generally, provide a bond, that is suitable for incorporation or tethering of another chemical entity, e.g., a ligand to the constituent ring.

[0382] The RNAi agents may be conjugated to a ligand via a carrier, wherein the carrier can be cyclic group or acyclic group; preferably, the cyclic group is selected from pyrrolidinyl, pyrazolinyl, pyrazolidinyl, imidazolinyl, imidazolidinyl, piperidinyl, piperazinyl, [1,3]dioxolane, oxazolidinyl, isoxazolidinyl, morpholinyl, thiazolidinyl, isothiazolidinyl, quinoxalinyl, pyridazinonyl, tetrahydrofuryl and decalin; preferably, the acyclic group is selected from serinol backbone or diethanolamine backbone.

[0383] In certain specific embodiments, the RNAi agent for use in the methods of the invention is an agent selected from the group of agents listed in any one of Tables 3, 4, 7, 8, 11, 13, and 15. These agents may further comprise a ligand.

### IV. iRNAs Conjugated to Ligands

[0384] Another modification of the RNA of an iRNA of the invention involves chemically linking to the RNA one or more ligands, moieties or conjugates that enhance the activity, cellular distribution or cellular uptake of the iRNA. Such moieties include but are not limited to lipid moieties such as a cholesterol moiety (Letsinger et al., Proc. Natl. Acid. Sci. USA, 1989, 86: 6553-6556), cholic acid (Manoharan et al., Biorg. Med. Chem. Let., 1994, 4:1053-1060), a thioether, e.g., beryl-S-tritylthiol (Manoharan et al., Ann. N.Y. Acad. Sci., 1992, 660:306-309; Manoharan et al., Biorg. Med. Chem. Let., 1993, 3:2765-2770), a thiocholesterol (Oberhauser et al., Nucl. Acids Res., 1992, 20:533-538), an aliphatic chain, e.g., dodecandiol or undecyl residues (Saison-Behmoaras et al., EMBO J, 1991, 10:1111-1118; Kabanov et al., FEBS Lett., 1990, 259:327-330; Svinarchuk et al., Biochimie, 1993, 75:49-54), a phospholipid, e.g., di-hexadecyl-rac-glycerol or triethyl-ammonium 1,2-di-O-hexadecyl-rac-glycero-3-phosphonate (Manoharan et al., Tetrahedron Lett., 1995, 36:3651-3654; Shea et al., Nucl. Acids Res., 1990, 18:3777-3783), a polyamine or a polyethylene glycol chain (Manoharan et al., Nucleosides & Nucleotides, 1995, 14:969-973), or adamantane acetic acid (Manoharan et al., Tetrahedron Lett., 1995, 36:3651-3654), a palmityl moiety (Mishra et al., Biochim. Biophys. Acta, 1995, 1264:229-237), or an octadecylamine or hexylamino-carbonyloxycholesterol moiety (Crooke et al., J. Pharmacol. Exp. Ther., 1996, 277:923-937).

[0385] In one embodiment, a ligand alters the distribution, targeting or lifetime of an iRNA agent into which it is incorporated. In preferred embodiments a ligand provides an enhanced affinity for a selected target, e.g., molecule, cell or cell type, compartment, e.g., a cellular or organ compartment, tissue, organ or region of the body, as, e.g., compared to a species absent such a ligand. Preferred ligands will not take part in duplex pairing in a duplexed nucleic acid.

[0386] Ligands can include a naturally occurring substance, such as a protein (e.g., human serum albumin (HSA), low-density lipoprotein (LDL), or globulin); carbohydrate (e.g., a dextran, pullulan, chitin, chitosan, inulin, cyclodextrin, N-acetylgalactosamine, or hyaluronic acid); or a lipid. The ligand can also be a recombinant or synthetic molecule, such as a synthetic polymer, e.g., a synthetic polyamino acid. Examples of polyamino acids include polyamino acid is a polylysine (PLL), poly L-aspartic acid, poly L-glutamic acid, styrene-maleic acid anhydride copolymer, poly(L-lactide-co-glycolied) copolymer, divinyl ether-maleic anhydride copolymer, N-(2-hydroxypropyl)methacrylamide copolymer (HMPA), polyethylene glycol (PEG), polyvinyl alcohol (PVA), polyurethane, poly(2-ethylacryllic acid), N-isopropylacrylamide polymers, or polyphosphazine. Example of polyamines include: polyethylenimine, polylysine (PLL), spermine, spermidine, polyamine, pseudopeptide-polyamine, peptidomimetic polyamine, dendrimer polyamine, arginine, amidine, protamine, cationic lipid, cationic porphyrin, quaternary salt of a polyamine, or an alpha helical peptide.

[0387] Ligands can also include targeting groups, e.g., a cell or tissue targeting agent, e.g., a lectin, glycoprotein, lipid or protein, e.g., an antibody, that binds to a specified cell type such as a kidney cell. A targeting group can be a thyrotropin, melanotropin, lectin, glycoprotein, surfactant protein A, Mucin carbohydrate, multivalent lactose, multivalent galactose, N-acetyl-galactosamine, N-acetyl-gulucoseamine multivalent mannose, multivalent fucose, glycosylated polyaminoacids, multivalent galactose, transferrin, bisphosphonate, polyglutamate, polyaspartate, a lipid, cholesterol, a steroid, bile acid, folate, vitamin B12, vitamin A, biotin, or an RGD peptide or RGD peptide mimetic.

[0388] Other examples of ligands include dyes, intercalating agents (e.g. acridines), cross-linkers (e.g. psoralene, mitomycin C), porphyrins (TPPC4, texaphyrin, Sapphyrin), polycyclic aromatic hydrocarbons (e.g., phenazine, dihydrophenazine), artificial endonucleases (e.g. EDTA), lipophilic molecules, e.g., cholesterol, cholic acid, adamantane acetic acid, 1-pyrene butyric acid, dihydrotestosterone, 1,3-Bis-O(hexadecyl)glycerol, geranyloxyhexyl group, hexadecylglycerol, borneol, menthol, 1,3-propanediol, heptadecyl group, palmitic acid, myristic acid, O3-(oleoyl)lithocholic acid, O3-(oleoyl)cholenic acid, dimethoxytrityl, or phenoxazine) and peptide conjugates (e.g., antennapedia peptide, Tat peptide), alkylating agents, phosphate, amino, mercapto, PEG (e.g., PEG-40K), MPEG, [MPEG]₂, polyamino, alkyl, substituted alkyl, radiolabeled markers, enzymes, haptens (e.g. biotin), transport/absorption facilitators (e.g., aspirin, vitamin E, folic acid), synthetic ribonucleases (e.g., imidazole, bisimidazole, histamine, imidazole clusters, acridine-imidazole conjugates, Eu3+ complexes of tetraazamacrocycles), dinitrophenyl, HRP, or AP.

[0389] Ligands can be proteins, e.g., glycoproteins, or peptides, e.g., molecules having a specific affinity for a co-ligand, or antibodies e.g., an antibody, that binds to a specified cell type such as a hepatic cell. Ligands can also include hormones and hormone receptors. They can also include non-peptidic species, such as lipids, lectins, carbohydrates, vitamins, cofactors, multivalent lactose, multivalent galactose, N-acetyl-galactosamine, N-acetyl-gulucosamine multivalent mannose, or multivalent fucose. The ligand can be, for example, a lipopolysaccharide, an activator of p38 MAP kinase, or an activator of NF-κB.

[0390] The ligand can be a substance, e.g., a drug, which can increase the uptake of the iRNA agent into the cell, for example, by disrupting the cell's cytoskeleton, e.g., by disrupting the cell's microtubules, microfilaments, and/or intermediate filaments. The drug can be, for example, taxon, vincristine, vinblastine, cytochalasin, nocodazole, japlakinolide, latrunculin A, phalloidin, swinholide A, indanocine, or myoservin.

[0391] In some embodiments, a ligand attached to an iRNA as described herein acts as a pharmacokinetic modulator (PK modulator). PK modulators include lipophiles, bile acids, steroids, phospholipid analogues, peptides, protein binding agents, PEG, vitamins etc. Exemplary PK modulators include, but are not limited to, cholesterol, fatty acids, cholic acid, lithocholic acid, dialkylglycerides, diacylglyceride, phospholipids, sphingolipids, naproxen, ibuprofen, vitamin E, biotin etc. Oligonucleotides that comprise a number of phosphorothioate linkages are also known to bind to serum protein, thus short oligonucleotides, e.g., oligonucleotides of about 5 bases, 10 bases, 15 bases or 20 bases, comprising multiple of phosphorothioate linkages in the backbone are also amenable to the present invention as ligands (e.g. as PK modulating ligands). In addition, aptamers that bind serum components (e.g. serum proteins) are also suitable for use as PK modulating ligands in the embodiments described herein.

[0392] Ligand-conjugated oligonucleotides of the invention may be synthesized by the use of an oligonucleotide that bears a pendant reactive functionality, such as that derived from the attachment of a linking molecule onto the oligonucleotide (described below). This reactive oligonucleotide may be reacted directly with commercially-available ligands, ligands that are synthesized bearing any of a variety of protecting groups, or ligands that have a linking moiety attached thereto.

[0393] The oligonucleotides used in the conjugates of the present invention may be conveniently and routinely made through the well-known technique of solid-phase synthesis. Equipment for such synthesis is sold by several vendors including, for example, Applied Biosystems (Foster City, Calif.). Any other means for such synthesis known in the art may additionally or alternatively be employed. It is also known to use similar techniques to prepare other oligonucleotides, such as the phosphorothioates and alkylated derivatives.

[0394] In the ligand-conjugated oligonucleotides and ligand-molecule bearing sequence-specific linked nucleosides of the present invention, the oligonucleotides and oligonucleosides may be assembled on a suitable DNA synthesizer utilizing standard nucleotide or nucleoside precursors, or nucleotide or nucleoside conjugate precursors that already bear the linking moiety, ligand-nucleotide or nucleoside-conjugate precursors that already bear the ligand molecule, or non-nucleoside ligand-bearing building blocks.

[0395] When using nucleotide-conjugate precursors that already bear a linking moiety, the synthesis of the sequence-specific linked nucleosides is typically completed, and the ligand molecule is then reacted with the linking moiety to form the ligand-conjugated oligonucleotide. In some embodiments, the oligonucleotides or linked nucleosides of the present invention are synthesized by an automated synthesizer using phosphoramidites derived from ligand-nucleoside conjugates in addition to the standard phosphoramidites and non-standard phosphoramidites that are commercially available and routinely used in oligonucleotide synthesis.

[0396] A. Lipid Conjugates

[0397] In one embodiment, the ligand or conjugate is a lipid or lipid-based molecule. Such a lipid or lipid-based molecule preferably binds a serum protein, e.g., human serum albumin (HSA). An HSA binding ligand allows for distribution of the conjugate to a target tissue, e.g., a non-kidney target tissue of the body. For example, the target tissue can be the liver, including parenchymal cells of the liver. Other molecules that can bind HSA can also be used as ligands. For example, naproxen or aspirin can be used. A lipid or lipid-based ligand can (a) increase resistance to degradation of the conjugate, (b) increase targeting or transport into a target cell or cell membrane, and/or (c) can be used to adjust binding to a serum protein, e.g., HSA.

[0398] A lipid based ligand can be used to inhibit, e.g., control the binding of the conjugate to a target tissue. For example, a lipid or lipid-based ligand that binds to HSA more strongly will be less likely to be targeted to the kidney and therefore less likely to be cleared from the body. A lipid or lipid-based ligand that binds to HSA less strongly can be used to target the conjugate to the kidney.

[0399] In a preferred embodiment, the lipid based ligand binds HSA. Preferably, it binds HSA with a sufficient affinity such that the conjugate will be preferably distributed to a non-kidney tissue. However, it is preferred that the affinity not be so strong that the HSA-ligand binding cannot be reversed.

[0400] In another preferred embodiment, the lipid based ligand binds HSA weakly or not at all, such that the conjugate will be preferably distributed to the kidney. Other moieties that target to kidney cells can also be used in place of or in addition to the lipid based ligand.

[0401] In another aspect, the ligand is a moiety, e.g., a vitamin, which is taken up by a target cell, e.g., a proliferating cell. These are particularly useful for treating disorders characterized by unwanted cell proliferation, e.g., of the malignant or non-malignant type, e.g., cancer cells. Exemplary vitamins include vitamin A, E, and K. Other exemplary vitamins include are B vitamin, e.g., folic acid, B12, riboflavin, biotin, pyridoxal or other vitamins or nutrients taken up by target cells such as liver cells. Also included are HSA and low density lipoprotein (LDL).

[0402] B. Cell Permeation Agents

[0403] In another aspect, the ligand is a cell-permeation agent, preferably a helical cell-permeation agent. Preferably, the agent is amphipathic. An exemplary agent is a peptide such as tat or antennopedia. If the agent is a peptide, it can be modified, including a peptidylmimetic, invertomers, non-peptide or pseudo-peptide linkages, and use of D-amino acids. The helical agent is preferably an alpha-helical agent, which preferably has a lipophilic and a lipophobic phase.

[0404] The ligand can be a peptide or peptidomimetic. A peptidomimetic (also referred to herein as an oligopeptidomimetic) is a molecule capable of folding into a defined three-dimensional structure similar to a natural peptide. The attachment of peptide and peptidomimetics to iRNA agents can affect pharmacokinetic distribution of the iRNA, such as by enhancing cellular recognition and absorption. The peptide or peptidomimetic moiety can be about 5-50 amino acids long, e.g., about 5, 10, 15, 20, 25, 30, 35, 40, 45, or 50 amino acids long.

[0405] A peptide or peptidomimetic can be, for example, a cell permeation peptide, cationic peptide, amphipathic peptide, or hydrophobic peptide (e.g., consisting primarily of Tyr, Trp or Phe). The peptide moiety can be a dendrimer peptide, constrained peptide or crosslinked peptide. In another alternative, the peptide moiety can include a hydrophobic membrane translocation sequence (MTS). An exemplary hydrophobic MTS-containing peptide is RFGF having the amino acid sequence AAVALLPAVLLALLAP (SEQ ID NO: 9). An RFGF analogue (e.g., amino acid sequence AALLPVLLAAP (SEQ ID NO: 10) containing a hydrophobic MTS can also be a targeting moiety. The peptide moiety can be a “delivery” peptide, which can carry large polar molecules including peptides, oligonucleotides, and protein across cell membranes. For example, sequences from the HIV Tat protein (GRKKRRQRRRPPQ (SEQ ID NO: 11) and the Drosophila Antennapedia protein (RQIKIWFQNRRMKWKK (SEQ ID NO: 12) have been found to be capable of functioning as delivery peptides. A peptide or peptidomimetic can be encoded by a random sequence of DNA, such as a peptide identified from a phage-display library, or one-bead-one-compound (OBOC) combinatorial library (Lam et al., Nature, 354:82-84, 1991). Examples of a peptide or peptidomimetic tethered to a dsRNA agent via an incorporated monomer unit for cell targeting purposes is an arginine-glycine-aspartic acid (RGD)-peptide, or RGD mimic. A peptide moiety can range in length from about 5 amino acids to about 40 amino acids. The peptide moieties can have a structural modification, such as to increase stability or direct conformational properties. Any of the structural modifications described below can be utilized.

[0406] An RGD peptide for use in the compositions and methods of the invention may be linear or cyclic, and may be modified, e.g., glycosylated or methylated, to facilitate targeting to a specific tissue(s). RGD-containing peptides and peptidiomimemtics may include D-amino acids, as well as synthetic RGD mimics. In addition to RGD, one can use other moieties that target the integrin ligand. Preferred conjugates of this ligand target PECAM-1 or VEGF.

[0407] A “cell permeation peptide” is capable of permeating a cell, e.g., a microbial cell, such as a bacterial or fungal cell, or a mammalian cell, such as a human cell. A microbial cell-permeating peptide can be, for example, an α-helical linear peptide (e.g., LL-37 or Ceropin P1), a disulfide bond-containing peptide (e.g., α-defensin, β-defensin or bactenecin), or a peptide containing only one or two dominating amino acids (e.g., PR-39 or indolicidin). A cell permeation peptide can also include a nuclear localization signal (NLS). For example, a cell permeation peptide can be a bipartite amphipathic peptide, such as MPG, which is derived from the fusion peptide domain of HIV-1 gp41 and the NLS of SV40 large T antigen (Simeoni et al., Nucl. Acids Res. 31:2717-2724, 2003).

[0408] C. Carbohydrate Conjugates

[0409] In some embodiments of the compositions and methods of the invention, an iRNA oligonucleotide further comprises a carbohydrate. The carbohydrate conjugated iRNA are advantageous for the in vivo delivery of nucleic acids, as well as compositions suitable for in vivo therapeutic use, as described herein. As used herein, “carbohydrate” refers to a compound which is either a carbohydrate per se made up of one or more monosaccharide units having at least 6 carbon atoms (which can be linear, branched or cyclic) with an oxygen, nitrogen or sulfur atom bonded to each carbon atom; or a compound having as a part thereof a carbohydrate moiety made up of one or more monosaccharide units each having at least six carbon atoms (which can be linear, branched or cyclic), with an oxygen, nitrogen or sulfur atom bonded to each carbon atom. Representative carbohydrates include the sugars (mono-, di-, tri- and oligosaccharides containing from about 4, 5, 6, 7, 8, or 9 monosaccharide units), and polysaccharides such as starches, glycogen, cellulose and polysaccharide gums. Specific monosaccharides include AGT and above (e.g., AGT, C6, C7, or C8) sugars; di- and trisaccharides include sugars having two or three monosaccharide units (e.g., AGT, C6, C7, or C8).

[0410] In one embodiment, a carbohydrate conjugate for use in the compositions and methods of the invention is a monosaccharide. In one embodiment, the monosaccharide is an N-acetyl galactosamine such as

[chemical structure]

[0411] In another embodiment, a carbohydrate conjugate for use in the compositions and methods of the invention is selected from the group consisting of:

[chemical structure]

[chemical structure]

[chemical structure]

[chemical structure]

[chemical structure]

[chemical structure]

[0412] Another representative carbohydrate conjugate for use in the embodiments described herein includes, but is not limited to,

[chemical structure]

when one of X or Y is an oligonucleotide, the other is a hydrogen.

[0413] In some embodiments, the carbohydrate conjugate further comprises one or more additional ligands as described above, such as, but not limited to, a PK modulator and/or a cell permeation peptide.

[0414] Additional carbohydrate conjugates (and linkers) suitable for use in the present invention include those described in PCT Publication Nos. WO 2014/179620 and WO 2014/179627, the entire contents of each of which are incorporated herein by reference.

[0415] D. Linkers

[0416] In some embodiments, the conjugate or ligand described herein can be attached to an iRNA oligonucleotide with various linkers that can be cleavable or non-cleavable.

[0417] The term “linker” or “linking group” means an organic moiety that connects two parts of a compound, e.g., covalently attaches two parts of a compound. Linkers typically comprise a direct bond or an atom such as oxygen or sulfur, a unit such as NR8, C(O), C(O)NH, SO, SO₂, SO₂NH or a chain of atoms, such as, but not limited to, substituted or unsubstituted alkyl, substituted or unsubstituted alkenyl, substituted or unsubstituted alkynyl, arylalkyl, arylalkenyl, arylalkynyl, heteroarylalkyl, heteroarylalkenyl, heteroarylalkynyl, heterocyclylalkyl, heterocyclylalkenyl, heterocyclylalkynyl, aryl, heteroaryl, heterocyclyl, cycloalkyl, cycloalkenyl, alkylarylalkyl, alkylarylalkenyl, alkylarylalkynyl, alkenylarylalkyl, alkenylarylalkenyl, alkenylarylalkynyl, alkynylarylalkyl, alkynylarylalkenyl, alkynylarylalkynyl, alkylheteroarylalkyl, alkylheteroarylalkenyl, alkylheteroarylalkynyl, alkenylheteroarylalkyl, alkenylheteroarylalkenyl, alkenylheteroarylalkynyl, alkynylheteroarylalkyl, alkynylheteroarylalkenyl, alkynylheteroarylalkynyl, alkylheterocyclylalkyl, alkylheterocyclylalkenyl, alkylhererocyclylalkynyl, alkenylheterocyclylalkyl, alkenylheterocyclylalkenyl, alkenylheterocyclylalkynyl, alkynylheterocyclylalkyl, alkynylheterocyclylalkenyl, alkynylheterocyclylalkynyl, alkylaryl, alkenylaryl, alkynylaryl, alkylheteroaryl, alkenylheteroaryl, alkynylhereroaryl, which one or more methylenes can be interrupted or terminated by O, S, S(O), SO₂, N(R8), C(O), substituted or unsubstituted aryl, substituted or unsubstituted heteroaryl, substituted or unsubstituted heterocyclic; where R8 is hydrogen, acyl, aliphatic or substituted aliphatic. In one embodiment, the linker is between about 1-24 atoms, 2-24, 3-24, 4-24, 5-24, 6-24, 6-18, 7-18, 8-18 atoms, 7-17, 8-17, 6-16, 7-16, or 8-16 atoms.

[0418] A cleavable linking group is one which is sufficiently stable outside the cell, but which upon entry into a target cell is cleaved to release the two parts the linker is holding together. In a preferred embodiment, the cleavable linking group is cleaved at least about 10 times, 20, times, 30 times, 40 times, 50 times, 60 times, 70 times, 80 times, 90 times or more, or at least about 100 times faster in a target cell or under a first reference condition (which can, e.g., be selected to mimic or represent intracellular conditions) than in the blood of a subject, or under a second reference condition (which can, e.g., be selected to mimic or represent conditions found in the blood or serum).

[0419] Cleavable linking groups are susceptible to cleavage agents, e.g., pH, redox potential or the presence of degradative molecules. Generally, cleavage agents are more prevalent or found at higher levels or activities inside cells than in serum or blood. Examples of such degradative agents include: redox agents which are selected for particular substrates or which have no substrate specificity, including, e.g., oxidative or reductive enzymes or reductive agents such as mercaptans, present in cells, that can degrade a redox cleavable linking group by reduction; esterases; endosomes or agents that can create an acidic environment, e.g., those that result in a pH of five or lower; enzymes that can hydrolyze or degrade an acid cleavable linking group by acting as a general acid, peptidases (which can be substrate specific), and phosphatases.

[0420] A cleavable linkage group, such as a disulfide bond can be susceptible to pH. The pH of human serum is 7.4, while the average intracellular pH is slightly lower, ranging from about 7.1-7.3. Endosomes have a more acidic pH, in the range of 5.5-6.0, and lysosomes have an even more acidic pH at around 5.0. Some linkers will have a cleavable linking group that is cleaved at a preferred pH, thereby releasing a cationic lipid from the ligand inside the cell, or into the desired compartment of the cell.

[0421] A linker can include a cleavable linking group that is cleavable by a particular enzyme. The type of cleavable linking group incorporated into a linker can depend on the cell to be targeted. For example, a liver-targeting ligand can be linked to a cationic lipid through a linker that includes an ester group. Liver cells are rich in esterases, and therefore the linker will be cleaved more efficiently in liver cells than in cell types that are not esterase-rich. Other cell-types rich in esterases include cells of the lung, renal cortex, and testis.

[0422] Linkers that contain peptide bonds can be used when targeting cell types rich in peptidases, such as liver cells and synoviocytes.

[0423] In general, the suitability of a candidate cleavable linking group can be evaluated by testing the ability of a degradative agent (or condition) to cleave the candidate linking group. It will also be desirable to also test the candidate cleavable linking group for the ability to resist cleavage in the blood or when in contact with other non-target tissue. Thus, one can determine the relative susceptibility to cleavage between a first and a second condition, where the first is selected to be indicative of cleavage in a target cell and the second is selected to be indicative of cleavage in other tissues or biological fluids, e.g., blood or serum. The evaluations can be carried out in cell free systems, in cells, in cell culture, in organ or tissue culture, or in whole animals. It can be useful to make initial evaluations in cell-free or culture conditions and to confirm by further evaluations in whole animals. In preferred embodiments, useful candidate compounds are cleaved at least about 2, 4, 10, 20, 30, 40, 50, 60, 70, 80, 90, or about 100 times faster in the cell (or under in vitro conditions selected to mimic intracellular conditions) as compared to blood or serum (or under in vitro conditions selected to mimic extracellular conditions).

[0424] i. Redox Cleavable Linking Groups

[0425] In one embodiment, a cleavable linking group is a redox cleavable linking group that is cleaved upon reduction or oxidation. An example of reductively cleavable linking group is a disulphide linking group (—S—S—). To determine if a candidate cleavable linking group is a suitable “reductively cleavable linking group,” or for example is suitable for use with a particular iRNA moiety and particular targeting agent one can look to methods described herein. For example, a candidate can be evaluated by incubation with dithiothreitol (DTT), or other reducing agent using reagents know in the art, which mimic the rate of cleavage which would be observed in a cell, e.g., a target cell. The candidates can also be evaluated under conditions which are selected to mimic blood or serum conditions. In one, candidate compounds are cleaved by at most about 10% in the blood. In other embodiments, useful candidate compounds are degraded at least about 2, 4, 10, 20, 30, 40, 50, 60, 70, 80, 90, or about 100 times faster in the cell (or under in vitro conditions selected to mimic intracellular conditions) as compared to blood (or under in vitro conditions selected to mimic extracellular conditions). The rate of cleavage of candidate compounds can be determined using standard enzyme kinetics assays under conditions chosen to mimic intracellular media and compared to conditions chosen to mimic extracellular media.

[0426] ii. Phosphate-Based Cleavable Linking Groups

[0427] In another embodiment, a cleavable linker comprises a phosphate-based cleavable linking group. A phosphate-based cleavable linking group is cleaved by agents that degrade or hydrolyze the phosphate group. An example of an agent that cleaves phosphate groups in cells are enzymes such as phosphatases in cells. Examples of phosphate-based linking groups are —O—P(O)(ORk)-O—, —O—P(S)(ORk)-O—, —O—P(S)(SRk)-O—, —S—P(O)(ORk)-O—, —O —P(O)(ORk)-S—, —S—P(O)(ORk)-S—, —O—P(S)(ORk)-S—, —S—P(S)(ORk)-O—, —O—P(O)(Rk)-O—, —O —P(S)(Rk)-O—, —S—P(O)(Rk)-O—, —S—P(S)(Rk)-O—, —S—P(O)(Rk)-S—, —O—P(S)(Rk)-S—. Preferred embodiments are —O—P(O)(OH)—O—, —O—P(S)(OH)—O—, —O—P(S)(SH)—O—, —S—P(O)(OH)—O—, —O —P(O)(OH)—S—, —S—P(O)(OH)—S—, —O—P(S)(OH)—S—, —S—P(S)(OH)—O—, —O—P(O)(H)—O—, —O —P(S)(H)—O—, —S—P(O)(H)—O, —S—P(S)(H)—O—, —S—P(O)(H)—S—, —O—P(S)(H)—S—. A preferred embodiment is —O—P(O)(OH)—O—. These candidates can be evaluated using methods analogous to those described above.

[0428] iii. Acid Cleavable Linking Groups

[0429] In another embodiment, a cleavable linker comprises an acid cleavable linking group. An acid cleavable linking group is a linking group that is cleaved under acidic conditions. In preferred embodiments acid cleavable linking groups are cleaved in an acidic environment with a pH of about 6.5 or lower (e.g., about 6.0, 5.75, 5.5, 5.25, 5.0, or lower), or by agents such as enzymes that can act as a general acid. In a cell, specific low pH organelles, such as endosomes and lysosomes can provide a cleaving environment for acid cleavable linking groups. Examples of acid cleavable linking groups include but are not limited to hydrazones, esters, and esters of amino acids. Acid cleavable groups can have the general formula —C═NN—, C(O)O, or —OC(O). A preferred embodiment is when the carbon attached to the oxygen of the ester (the alkoxy group) is an aryl group, substituted alkyl group, or tertiary alkyl group such as dimethyl pentyl or t-butyl. These candidates can be evaluated using methods analogous to those described above.

[0430] iv. Ester-Based Linking Groups

[0431] In another embodiment, a cleavable linker comprises an ester-based cleavable linking group. An ester-based cleavable linking group is cleaved by enzymes such as esterases and amidases in cells. Examples of ester-based cleavable linking groups include but are not limited to esters of alkylene, alkenylene and alkynylene groups. Ester cleavable linking groups have the general formula —C(O)O—, or —OC(O)—. These candidates can be evaluated using methods analogous to those described above.

[0432] v. Peptide-Based Cleaving Groups

[0433] In yet another embodiment, a cleavable linker comprises a peptide-based cleavable linking group. A peptide-based cleavable linking group is cleaved by enzymes such as peptidases and proteases in cells. Peptide-based cleavable linking groups are peptide bonds formed between amino acids to yield oligopeptides (e.g., dipeptides, tripeptides etc.) and polypeptides. Peptide-based cleavable groups do not include the amide group (—C(O)NH—).

[0434] The amide group can be formed between any alkylene, alkenylene or alkynelene. A peptide bond is a special type of amide bond formed between amino acids to yield peptides and proteins. The peptide based cleavage group is generally limited to the peptide bond (i.e., the amide bond) formed between amino acids yielding peptides and proteins and does not include the entire amide functional group. Peptide-based cleavable linking groups have the general formula —NHCHRAC(O)NHCHRBC(O)—, where RA and RB are the R groups of the two adjacent amino acids. These candidates can be evaluated using methods analogous to those described above.

[0435] In one embodiment, an iRNA of the invention is conjugated to a carbohydrate through a linker. Non-limiting examples of iRNA carbohydrate conjugates with linkers of the compositions and methods of the invention include, but are not limited to,

[chemical structure]

[chemical structure]

[chemical structure]

[0436] when one of X or Y is an oligonucleotide, the other is a hydrogen.

[0437] In certain embodiments of the compositions and methods of the invention, a ligand is one or more “GalNAc” (N-acetylgalactosamine) derivatives attached through a bivalent or trivalent branched linker.

[0438] In one embodiment, a dsRNA of the invention is conjugated to a bivalent or trivalent branched linker selected from the group of structures shown in any of formula (XXXII)-(XXXV):

[chemical structure]

wherein:
q2A, q2B, q3A, q3B, q4A, q4B, q5A, q5B and q5C represent independently for each occurrence 0-20 and wherein the repeating unit can be the same or different;
P^{2A}, P^{2B}, P^{3A}, P^{3B}, P^{4A}, P^{4B}, P^{5A}, P^{5B}, P^{5C}, T^{2A}, T^{2B}, T^{3A}, T^{3B}, T^{4A}, T^{4B}, T^{4A}, T^{5B}, T^{5C} are each independently for each occurrence absent, CO, NH, O, S, OC(O), NHC(O), CH₂, CH₂NH or CH₂O;
Q^{2A}, Q^{2B}, Q^{3A}, Q^{3B}, Q^{4A}, Q^{4B}, Q^{5A}, Q^{5B}, Q^{5C} are independently for each occurrence absent, alkylene, substituted alkylene wherein one or more methylenes can be interrupted or terminated by one or more of O, S, S(O), SO₂, N(R^{N}), C(R′)═C(R″), C≡C or C(O);
R^{2A}, R^{2B}, R^{3A}, R^{3B}, R^{4A}, R^{4B}, R^{5A}, R^{5B}, R^{5C} are each independently for each occurrence absent, NH, O, S, CH₂, C(O)O, C(O)NH, NHCH(R^{a})C(O), —C(O)—CH(R^{a})—NH—, CO, CH═N-O

[chemical structure]

or heterocyclyl;

[0439] L^{2A}, L^{2B}, L^{3A}, L^{3B}, L^{4A}, L^{4B}, L^{5A}, L^{5B} and L^{5C} represent the ligand; i.e. each independently for each occurrence a monosaccharide (such as GalNAc), disaccharide, trisaccharide, tetrasaccharide, oligosaccharide, or polysaccharide; and R^{a} is H or amino acid side chain. Trivalent conjugating GalNAc derivatives are particularly useful for use with RNAi agents for inhibiting the expression of a target gene, such as those of formula (XXXV):

[chemical structure]

[0440] wherein L^{5A} L^{5B} and L^{5C} represent a monosaccharide, such as GalNAc derivative.

[0441] Examples of suitable bivalent and trivalent branched linker groups conjugating GalNAc derivatives include, but are not limited to, the structures recited above as formulas II, VII, XI, X, and XIII.

[0442] Representative U.S. patents that teach the preparation of RNA conjugates include, but are not limited to, U.S. Pat. Nos. 4,828,979; 4,948,882; 5,218,105; 5,525,465; 5,541,313; 5,545,730; 5,552,538; 5,578,717, 5,580,731; 5,591,584; 5,109,124; 5,118,802; 5,138,045; 5,414,077; 5,486,603; 5,512,439; 5,578,718; 5,608,046; 4,587,044; 4,605,735; 4,667,025; 4,762,779; 4,789,737; 4,824,941; 4,835,263; 4,876,335; 4,904,582; 4,958,013; 5,082,830; 5,112,963; 5,214,136; 5,082,830; 5,112,963; 5,214,136; 5,245,022; 5,254,469; 5,258,506; 5,262,536; 5,272,250; 5,292,873; 5,317,098; 5,371,241, 5,391,723; 5,416,203, 5,451,463; 5,510,475; 5,512,667; 5,514,785; 5,565,552; 5,567,810; 5,574,142; 5,585,481; 5,587,371; 5,595,726; 5,597,696; 5,599,923; 5,599,928 and 5,688,941; 6,294,664; 6,320,017; 6,576,752; 6,783,931; 6,900,297; 7,037,646; 8,106,022, the entire contents of each of which are hereby incorporated herein by reference.

[0443] It is not necessary for all positions in a given compound to be uniformly modified, and in fact more than one of the aforementioned modifications can be incorporated in a single compound or even at a single nucleoside within an iRNA. The present invention also includes iRNA compounds that are chimeric compounds.

[0444] “Chimeric” iRNA compounds or “chimeras,” in the context of this invention, are iRNA compounds, preferably dsRNAs, which contain two or more chemically distinct regions, each made up of at least one monomer unit, i.e., a nucleotide in the case of a dsRNA compound. These iRNAs typically contain at least one region wherein the RNA is modified so as to confer upon the iRNA increased resistance to nuclease degradation, increased cellular uptake, and/or increased binding affinity for the target nucleic acid. An additional region of the iRNA can serve as a substrate for enzymes capable of cleaving RNA:DNA or RNA:RNA hybrids. By way of example, RNase H is a cellular endonuclease which cleaves the RNA strand of an RNA:DNA duplex. Activation of RNase H, therefore, results in cleavage of the RNA target, thereby greatly enhancing the efficiency of iRNA inhibition of gene expression. Consequently, comparable results can often be obtained with shorter iRNAs when chimeric dsRNAs are used, compared to phosphorothioate deoxy dsRNAs hybridizing to the same target region. Cleavage of the RNA target can be routinely detected by gel electrophoresis and, if necessary, associated nucleic acid hybridization techniques known in the art.

[0445] In certain instances, the RNA of an iRNA can be modified by a non-ligand group. A number of non-ligand molecules have been conjugated to iRNAs in order to enhance the activity, cellular distribution or cellular uptake of the iRNA, and procedures for performing such conjugations are available in the scientific literature. Such non-ligand moieties have included lipid moieties, such as cholesterol (Kubo, T. et al., Biochem. Biophys. Res. Comm., 2007, 365(1):54-61; Letsinger et al., Proc. Natl. Acad. Sci. USA, 1989, 86:6553), cholic acid (Manoharan et al., Bioorg. Med. Chem. Lett., 1994, 4:1053), a thioether, e.g., hexyl-S-tritylthiol (Manoharan et al., Ann. N.Y. Acad. Sci., 1992, 660:306; Manoharan et al., Bioorg. Med. Chem. Let., 1993, 3:2765), a thiocholesterol (Oberhauser et al., Nucl. Acids Res., 1992, 20:533), an aliphatic chain, e.g., dodecandiol or undecyl residues (Saison-Behmoaras et al., EMBO J., 1991, 10:111; Kabanov et al., FEBS Lett., 1990, 259:327; Svinarchuk et al., Biochimie, 1993, 75:49), a phospholipid, e.g., di-hexadecyl-rac-glycerol or triethylammonium 1,2-di-O-hexadecyl-rac-glycero-3-H-phosphonate (Manoharan et al., Tetrahedron Lett., 1995, 36:3651; Shea et al., Nucl. Acids Res., 1990, 18:3777), a polyamine or a polyethylene glycol chain (Manoharan et al., Nucleosides & Nucleotides, 1995, 14:969), or adamantane acetic acid (Manoharan et al., Tetrahedron Lett., 1995, 36:3651), a palmityl moiety (Mishra et al., Biochim. Biophys. Acta, 1995, 1264:229), or an octadecylamine or hexylamino-carbonyl-oxycholesterol moiety (Crooke et al., J. Pharmacol. Exp. Ther., 1996, 277:923). Representative United States patents that teach the preparation of such RNA conjugates have been listed above. Typical conjugation protocols involve the synthesis of an RNAs bearing an aminolinker at one or more positions of the sequence. The amino group is then reacted with the molecule being conjugated using appropriate coupling or activating reagents. The conjugation reaction can be performed either with the RNA still bound to the solid support or following cleavage of the RNA, in solution phase. Purification of the RNA conjugate by HPLC typically affords the pure conjugate.

### V. Delivery of an iRNA of the Invention

[0446] The delivery of an iRNA of the invention to a cell e.g., a cell within a subject, such as a human subject (e.g., a subject in need thereof, such as a subject having an antgiotensin associated disease or condition) can be achieved in a number of different ways. For example, delivery may be performed by contacting a cell with an iRNA of the invention either in vitro or in vivo. In vivo delivery may also be performed directly by administering a composition comprising an iRNA, e.g., a dsRNA, to a subject. Alternatively, in vivo delivery may be performed indirectly by administering one or more vectors that encode and direct the expression of the iRNA. These alternatives are discussed further below.

[0447] In general, any method of delivering a nucleic acid molecule (in vitro or in vivo) can be adapted for use with an iRNA of the invention (see e.g., Akhtar S. and Julian R L. (1992) Trends Cell. Biol. 2(5):139-144 and WO94/02595, which are incorporated herein by reference in their entireties). For in vivo delivery, factors to consider in order to deliver an iRNA molecule include, for example, biological stability of the delivered molecule, prevention of non-specific effects, and accumulation of the delivered molecule in the target tissue. The non-specific effects of an iRNA can be minimized by local administration, for example, by direct injection or implantation into a tissue or topically administering the preparation. Local administration to a treatment site maximizes local concentration of the agent, limits the exposure of the agent to systemic tissues that can otherwise be harmed by the agent or that can degrade the agent, and permits a lower total dose of the iRNA molecule to be administered. Several studies have shown successful knockdown of gene products when an iRNA is administered locally. For example, intraocular delivery of a VEGF dsRNA by intravitreal injection in cynomolgus monkeys (Tolentino, M J., et al (2004) Retina 24:132-138) and subretinal injections in mice (Reich, S J., et al (2003) Mol. Vis. 9:210-216) were both shown to prevent neovascularization in an experimental model of age-related macular degeneration. In addition, direct intratumoral injection of a dsRNA in mice reduces tumor volume (Pille, J., et al (2005) Mol. Ther. 11:267-274) and can prolong survival of tumor-bearing mice (Kim, W J., et al (2006)Mol. Ther. 14:343-350; Li, S., et al (2007)Mol. Ther. 15:515-523). RNA interference has also shown success with local delivery to the CNS by direct injection (Dorn, G., et al. (2004) Nucleic Acids 32:e49; Tan, P H., et al (2005) Gene Ther. 12:59-66; Makimura, H., et al (2002) BMC Neurosci. 3:18; Shishkina, G T., et al (2004) Neuroscience 129:521-528; Thakker, E R., et al (2004) Proc. Natl. Acad. Sci. U.S.A. 101:17270-17275; Akaneya, Y., et al (2005) J Neurophysiol. 93:594-602) and to the lungs by intranasal administration (Howard, K A., et al (2006) Mol. Ther. 14:476-484; Zhang, X., et al (2004) J. Biol. Chem. 279:10677-10684; Bitko, V., et al (2005) Nat. Med. 11:50-55). For administering an iRNA systemically for the treatment of a disease, the RNA can be modified or alternatively delivered using a drug delivery system; both methods act to prevent the rapid degradation of the dsRNA by endo- and exo-nucleases in vivo. Modification of the RNA or the pharmaceutical carrier can also permit targeting of the iRNA composition to the target tissue and avoid undesirable off-target effects. iRNA molecules can be modified by chemical conjugation to lipophilic groups such as cholesterol to enhance cellular uptake and prevent degradation. For example, an iRNA directed against ApoB conjugated to a lipophilic cholesterol moiety was injected systemically into mice and resulted in knockdown of apoB mRNA in both the liver and jejunum (Soutschek, J., et al (2004) Nature 432:173-178). Conjugation of an iRNA to an aptamer has been shown to inhibit tumor growth and mediate tumor regression in a mouse model of prostate cancer (McNamara, J O., et al (2006) Nat. Biotechnol. 24:1005-1015). In an alternative embodiment, the iRNA can be delivered using drug delivery systems such as a nanoparticle, a dendrimer, a polymer, liposomes, or a cationic delivery system. Positively charged cationic delivery systems facilitate binding of an iRNA molecule (negatively charged) and also enhance interactions at the negatively charged cell membrane to permit efficient uptake of an iRNA by the cell. Cationic lipids, dendrimers, or polymers can either be bound to an iRNA, or induced to form a vesicle or micelle (see e.g., Kim S H., et al (2008) Journal of ControlledRelease 129(2):107-116) that encases an iRNA. The formation of vesicles or micelles further prevents degradation of the iRNA when administered systemically. Methods for making and administering cationic-iRNA complexes are well within the abilities of one skilled in the art (see e.g., Sorensen, D R., et al (2003) J Mol. Biol 327:761-766; Verma, U N., et al (2003) Clin. Cancer Res. 9:1291-1300; Arnold, A S et al (2007) J. Hypertens. 25:197-205, which are incorporated herein by reference in their entirety). Some non-limiting examples of drug delivery systems useful for systemic delivery of iRNAs include DOTAP (Sorensen, D R., et al (2003), supra; Verma, U N., et al (2003), supra), Oligofectamine, “solid nucleic acid lipid particles” (Zimmermann, T S., et al (2006) Nature 441:111-114), cardiolipin (Chien, P Y., et al (2005) Cancer Gene Ther. 12:321-328; Pal, A., et al (2005) Int J. Oncol. 26:1087-1091), polyethyleneimine (Bonnet M E., et al (2008) Pharm. Res. August 16 Epub ahead of print; Aigner, A. (2006) J Biomed. Biotechnol. 71659), Arg-Gly-Asp (RGD) peptides (Liu, S. (2006) Mol. Pharm. 3:472-487), and polyamidoamines (Tomalia, D A., et al (2007) Biochem. Soc. Trans. 35:61-67; Yoo, H., et al (1999) Pharm. Res. 16:1799-1804). In some embodiments, an iRNA forms a complex with cyclodextrin for systemic administration. Methods for administration and pharmaceutical compositions of iRNAs and cyclodextrins can be found in U.S. Pat. No. 7,427,605, which is herein incorporated by reference in its entirety.

A. Vector Encoded iRNAs of the Invention

[0448] iRNA targeting the AGT gene can be expressed from transcription units inserted into DNA or RNA vectors (see, e.g., Couture, A, et al., TIG. (1996), 12:5-10; Skillern, A., et al., International PCT Publication No. WO 00/22113, Conrad, International PCT Publication No. WO 00/22114, and Conrad, U.S. Pat. No. 6,054,299). Expression can be transient (on the order of hours to weeks) or sustained (weeks to months or longer), depending upon the specific construct used and the target tissue or cell type. These transgenes can be introduced as a linear construct, a circular plasmid, or a viral vector, which can be an integrating or non-integrating vector. The transgene can also be constructed to permit it to be inherited as an extrachromosomal plasmid (Gassmann, et al., Proc. Natl. Acad. Sci. USA (1995) 92:1292).

[0449] The individual strand or strands of an iRNA can be transcribed from a promoter on an expression vector. Where two separate strands are to be expressed to generate, for example, a dsRNA, two separate expression vectors can be co-introduced (e.g., by transfection or infection) into a target cell. Alternatively each individual strand of a dsRNA can be transcribed by promoters both of which are located on the same expression plasmid. In one embodiment, a dsRNA is expressed as inverted repeat polynucleotides joined by a linker polynucleotide sequence such that the dsRNA has a stem and loop structure.

[0450] iRNA expression vectors are generally DNA plasmids or viral vectors. Expression vectors compatible with eukaryotic cells, preferably those compatible with vertebrate cells, can be used to produce recombinant constructs for the expression of an iRNA as described herein. Eukaryotic cell expression vectors are well known in the art and are available from a number of commercial sources. Typically, such vectors are provided containing convenient restriction sites for insertion of the desired nucleic acid segment. Delivery of iRNA expressing vectors can be systemic, such as by intravenous or intramuscular administration, by administration to target cells ex-planted from the patient followed by reintroduction into the patient, or by any other means that allows for introduction into a desired target cell.

[0451] iRNA expression plasmids can be transfected into target cells as a complex with cationic lipid carriers (e.g., Oligofectamine) or non-cationic lipid-based carriers (e.g., Transit-TKO™). Multiple lipid transfections for iRNA-mediated knockdowns targeting different regions of a target RNA over a period of a week or more are also contemplated by the invention. Successful introduction of vectors into host cells can be monitored using various known methods. For example, transient transfection can be signaled with a reporter, such as a fluorescent marker, such as Green Fluorescent Protein (GFP). Stable transfection of cells ex vivo can be ensured using markers that provide the transfected cell with resistance to specific environmental factors (e.g., antibiotics and drugs), such as hygromycin B resistance.

[0452] Viral vector systems which can be utilized with the methods and compositions described herein include, but are not limited to, (a) adenovirus vectors; (b) retrovirus vectors, including but not limited to lentiviral vectors, moloney murine leukemia virus, etc.; (c) adeno-associated virus vectors; (d) herpes simplex virus vectors; (e) SV 40 vectors; (f) polyoma virus vectors; (g) papilloma virus vectors; (h) picornavirus vectors; (i) pox virus vectors such as an orthopox, e.g., vaccinia virus vectors or avipox, e.g. canary pox or fowl pox; and (j) a helper-dependent or gutless adenovirus. Replication-defective viruses can also be advantageous. Different vectors will or will not become incorporated into the cells' genome. The constructs can include viral sequences for transfection, if desired. Alternatively, the construct can be incorporated into vectors capable of episomal replication, e.g. EPV and EBV vectors. Constructs for the recombinant expression of an iRNA will generally require regulatory elements, e.g., promoters, enhancers, etc., to ensure the expression of the iRNA in target cells. Other aspects to consider for vectors and constructs are further described below.

[0453] Vectors useful for the delivery of an iRNA will include regulatory elements (promoter, enhancer, etc.) sufficient for expression of the iRNA in the desired target cell or tissue. The regulatory elements can be chosen to provide either constitutive or regulated/inducible expression.

[0454] Expression of the iRNA can be precisely regulated, for example, by using an inducible regulatory sequence that is sensitive to certain physiological regulators, e.g., circulating glucose levels, or hormones (Docherty et al., 1994, FASEB J. 8:20-24). Such inducible expression systems, suitable for the control of dsRNA expression in cells or in mammals include, for example, regulation by ecdysone, by estrogen, progesterone, tetracycline, chemical inducers of dimerization, and isopropyl-beta-D1-thiogalactopyranoside (IPTG). A person skilled in the art would be able to choose the appropriate regulatory/promoter sequence based on the intended use of the iRNA transgene.

[0455] Viral vectors that contain nucleic acid sequences encoding an iRNA can be used. For example, a retroviral vector can be used (see Miller et al., Meth. Enzymol. 217:581-599 (1993)). These retroviral vectors contain the components necessary for the correct packaging of the viral genome and integration into the host cell DNA. The nucleic acid sequences encoding an iRNA are cloned into one or more vectors, which facilitate delivery of the nucleic acid into a patient. More detail about retroviral vectors can be found, for example, in Boesen et al., Biotherapy 6:291-302 (1994), which describes the use of a retroviral vector to deliver the mdrl gene to hematopoietic stem cells in order to make the stem cells more resistant to chemotherapy. Other references illustrating the use of retroviral vectors in gene therapy are: Clowes et al., J. Clin. Invest. 93:644-651 (1994); Kiem et al., Blood 83:1467-1473 (1994); Salmons and Gunzberg, Human Gene Therapy 4:129-141 (1993); and Grossman and Wilson, Curr. Opin. in Genetics and Devel. 3:110-114 (1993). Lentiviral vectors contemplated for use include, for example, the HIV based vectors described in U.S. Pat. Nos. 6,143,520; 5,665,557; and 5,981,276, which are herein incorporated by reference.

[0456] Adenoviruses are also contemplated for use in delivery of iRNAs of the invention. Adenoviruses are especially attractive vehicles, e.g., for delivering genes to respiratory epithelia. Adenoviruses naturally infect respiratory epithelia where they cause a mild disease. Other targets for adenovirus-based delivery systems are liver, the central nervous system, endothelial cells, and muscle. Adenoviruses have the advantage of being capable of infecting non-dividing cells. Kozarsky and Wilson, Current Opinion in Genetics and Development 3:499-503 (1993) present a review of adenovirus-based gene therapy. Bout et al., Human Gene Therapy 5:3-10 (1994) demonstrated the use of adenovirus vectors to transfer genes to the respiratory epithelia of rhesus monkeys. Other instances of the use of adenoviruses in gene therapy can be found in Rosenfeld et al., Science 252:431-434 (1991); Rosenfeld et al., Cell 68:143-155 (1992); Mastrangeli et al., J. Clin. Invest. 91:225-234 (1993); PCT Publication WO94/12649; and Wang, et al., Gene Therapy 2:775-783 (1995). A suitable AV vector for expressing an iRNA featured in the invention, a method for constructing the recombinant AV vector, and a method for delivering the vector into target cells, are described in Xia H et al. (2002), Nat. Biotech. 20: 1006-1010.

[0457] Adeno-associated virus (AAV) vectors may also be used to delivery an iRNA of the invention (Walsh et al., Proc. Soc. Exp. Biol. Med. 204:289-300 (1993); U.S. Pat. No. 5,436,146). In one embodiment, the iRNA can be expressed as two separate, complementary single-stranded RNA molecules from a recombinant AAV vector having, for example, either the U6 or H1 RNA promoters, or the cytomegalovirus (CMV) promoter. Suitable AAV vectors for expressing the dsRNA featured in the invention, methods for constructing the recombinant AV vector, and methods for delivering the vectors into target cells are described in Samulski R et al. (1987), J Virol. 61: 3096-3101; Fisher K J et al. (1996), J. Virol, 70: 520-532; Samulski R et al. (1989), J. Virol. 63: 3822-3826; U.S. Pat. Nos. 5,252,479; 5,139,941; International Patent Application No. WO 94/13788; and International Patent Application No. WO 93/24641, the entire disclosures of which are herein incorporated by reference.

[0458] Another viral vector suitable for delivery of an iRNA of the inevtion is a pox virus such as a vaccinia virus, for example an attenuated vaccinia such as Modified Virus Ankara (MVA) or NYVAC, an avipox such as fowl pox or canary pox.

[0459] The tropism of viral vectors can be modified by pseudotyping the vectors with envelope proteins or other surface antigens from other viruses, or by substituting different viral capsid proteins, as appropriate. For example, lentiviral vectors can be pseudotyped with surface proteins from vesicular stomatitis virus (VSV), rabies, Ebola, Mokola, and the like. AAV vectors can be made to target different cells by engineering the vectors to express different capsid protein serotypes; see, e.g., Rabinowitz J E et al. (2002), J Virol 76:791-801, the entire disclosure of which is herein incorporated by reference.

[0460] The pharmaceutical preparation of a vector can include the vector in an acceptable diluent, or can include a slow release matrix in which the gene delivery vehicle is imbedded. Alternatively, where the complete gene delivery vector can be produced intact from recombinant cells, e.g., retroviral vectors, the pharmaceutical preparation can include one or more cells which produce the gene delivery system.

### VI. Pharmaceutical Compositions of the Invention

[0461] The present invention also includes pharmaceutical compositions and formulations which include the iRNAs of the invention. In one embodiment, provided herein are pharmaceutical compositions containing an iRNA, as described herein, and a pharmaceutically acceptable carrier. The pharmaceutical compositions containing the iRNA are useful for treating a disease or disorder associated with the expression or activity of an AGT gene. Such pharmaceutical compositions are formulated based on the mode of delivery. One example is compositions that are formulated for systemic administration via parenteral delivery, e.g., by subcutaneous (SC) or intravenous (IV) delivery. Another example is compositions that are formulated for direct delivery into the brain parenchyma, e.g., by infusion into the brain, such as by continuous pump infusion. The pharmaceutical compositions of the invention may be administered in dosages sufficient to inhibit expression of an AGT gene. In general, a suitable dose of an iRNA of the invention will be in the range of about 0.001 to about 200.0 milligrams per kilogram body weight of the recipient per day, generally in the range of about 1 to 50 mg per kilogram body weight per day. For example, the dsRNA can be administered at about 0.01 mg/kg, about 0.05 mg/kg, about 0.5 mg/kg, about 1 mg/kg, about 1.5 mg/kg, about 2 mg/kg, about 3 mg/kg, about 10 mg/kg, about 20 mg/kg, about 30 mg/kg, about 40 mg/kg, or about 50 mg/kg per single dose.

[0462] For example, the dsRNA may be administered at a dose of about 0.1, 0.2, 0.3, 0.4, 0.5, 0.6, 0.7, 0.8, 0.9, 1, 1.1, 1.2, 1.3, 1.4, 1.5, 1.6, 1.7, 1.8, 1.9, 2, 2.1, 2.2, 2.3, 2.4, 2.5, 2.6, 2.7, 2.8, 2.9, 3, 3.1, 3.2, 3.3, 3.4, 3.5, 3.6, 3.7, 3.8, 3.9, 4, 4.1, 4.2, 4.3, 4.4, 4.5, 4.6, 4.7, 4.8, 4.9, 5, 5.1, 5.2, 5.3, 5.4, 5.5, 5.6, 5.7, 5.8, 5.9, 6, 6.1, 6.2, 6.3, 6.4, 6.5, 6.6, 6.7, 6.8, 6.9, 7, 7.1, 7.2, 7.3, 7.4, 7.5, 7.6, 7.7, 7.8, 7.9, 8, 8.1, 8.2, 8.3, 8.4, 8.5, 8.6, 8.7, 8.8, 8.9, 9, 9.1, 9.2, 9.3, 9.4, 9.5, 9.6, 9.7, 9.8, 9.9, or about 10 mg/kg. Values and ranges intermediate to the recited values are also intended to be part of this invention.

[0463] In another embodiment, the dsRNA is administered at a dose of about 0.1 to about 50 mg/kg, about 0.25 to about 50 mg/kg, about 0.5 to about 50 mg/kg, about 0.75 to about 50 mg/kg, about 1 to about 50 mg/kg, about 1.5 to about 50 mg/kg, about 2 to about 50 mg/kg, about 2.5 to about 50 mg/kg, about 3 to about 50 mg/kg, about 3.5 to about 50 mg/kg, about 4 to about 50 mg/kg, about 4.5 to about 50 mg/kg, about 5 to about 50 mg/kg, about 7.5 to about 50 mg/kg, about 10 to about 50 mg/kg, about 15 to about 50 mg/kg, about 20 to about 50 mg/kg, about 20 to about 50 mg/kg, about 25 to about 50 mg/kg, about 25 to about 50 mg/kg, about 30 to about 50 mg/kg, about 35 to about 50 mg/kg, about 40 to about 50 mg/kg, about 45 to about 50 mg/kg, about 0.1 to about 45 mg/kg, about 0.25 to about 45 mg/kg, about 0.5 to about 45 mg/kg, about 0.75 to about 45 mg/kg, about 1 to about 45 mg/kg, about 1.5 to about 45 mg/kg, about 2 to about 45 mg/kg, about 2.5 to about 45 mg/kg, about 3 to about 45 mg/kg, about 3.5 to about 45 mg/kg, about 4 to about 45 mg/kg, about 4.5 to about 45 mg/kg, about 5 to about 45 mg/kg, about 7.5 to about 45 mg/kg, about 10 to about 45 mg/kg, about 15 to about 45 mg/kg, about 20 to about 45 mg/kg, about 20 to about 45 mg/kg, about 25 to about 45 mg/kg, about 25 to about 45 mg/kg, about 30 to about 45 mg/kg, about 35 to about 45 mg/kg, about 40 to about 45 mg/kg, about 0.1 to about 40 mg/kg, about 0.25 to about 40 mg/kg, about 0.5 to about 40 mg/kg, about 0.75 to about 40 mg/kg, about 1 to about 40 mg/kg, about 1.5 to about 40 mg/kg, about 2 to about 40 mg/kg, about 2.5 to about 40 mg/kg, about 3 to about 40 mg/kg, about 3.5 to about 40 mg/kg, about 4 to about 40 mg/kg, about 4.5 to about 40 mg/kg, about 5 to about 40 mg/kg, about 7.5 to about 40 mg/kg, about 10 to about 40 mg/kg, about 15 to about 40 mg/kg, about 20 to about 40 mg/kg, about 20 to about 40 mg/kg, about 25 to about 40 mg/kg, about 25 to about 40 mg/kg, about 30 to about 40 mg/kg, about 35 to about 40 mg/kg, about 0.1 to about 30 mg/kg, about 0.25 to about 30 mg/kg, about 0.5 to about 30 mg/kg, about 0.75 to about 30 mg/kg, about 1 to about 30 mg/kg, about 1.5 to about 30 mg/kg, about 2 to about 30 mg/kg, about 2.5 to about 30 mg/kg, about 3 to about 30 mg/kg, about 3.5 to about 30 mg/kg, about 4 to about 30 mg/kg, about 4.5 to about 30 mg/kg, about 5 to about 30 mg/kg, about 7.5 to about 30 mg/kg, about 10 to about 30 mg/kg, about 15 to about 30 mg/kg, about 20 to about 30 mg/kg, about 20 to about 30 mg/kg, about 25 to about 30 mg/kg, about 0.1 to about 20 mg/kg, about 0.25 to about 20 mg/kg, about 0.5 to about 20 mg/kg, about 0.75 to about 20 mg/kg, about 1 to about 20 mg/kg, about 1.5 to about 20 mg/kg, about 2 to about 20 mg/kg, about 2.5 to about 20 mg/kg, about 3 to about 20 mg/kg, about 3.5 to about 20 mg/kg, about 4 to about 20 mg/kg, about 4.5 to about 20 mg/kg, about 5 to about 20 mg/kg, about 7.5 to about 20 mg/kg, about 10 to about 20 mg/kg, or about 15 to about 20 mg/kg. Values and ranges intermediate to the recited values are also intended to be part of this invention.

[0464] For example, the dsRNA may be administered at a dose of about 0.01, 0.02, 0.03, 0.04, 0.05, 0.06, 0.07, 0.08, 0.09, 0.1, 0.2, 0.3, 0.4, 0.5, 0.6, 0.7, 0.8, 0.9, 1, 1.1, 1.2, 1.3, 1.4, 1.5, 1.6, 1.7, 1.8, 1.9, 2, 2.1, 2.2, 2.3, 2.4, 2.5, 2.6, 2.7, 2.8, 2.9, 3, 3.1, 3.2, 3.3, 3.4, 3.5, 3.6, 3.7, 3.8, 3.9, 4, 4.1, 4.2, 4.3, 4.4, 4.5, 4.6, 4.7, 4.8, 4.9, 5, 5.1, 5.2, 5.3, 5.4, 5.5, 5.6, 5.7, 5.8, 5.9, 6, 6.1, 6.2, 6.3, 6.4, 6.5, 6.6, 6.7, 6.8, 6.9, 7, 7.1, 7.2, 7.3, 7.4, 7.5, 7.6, 7.7, 7.8, 7.9, 8, 8.1, 8.2, 8.3, 8.4, 8.5, 8.6, 8.7, 8.8, 8.9, 9, 9.1, 9.2, 9.3, 9.4, 9.5, 9.6, 9.7, 9.8, 9.9, or about 10 mg/kg. Values and ranges intermediate to the recited values are also intended to be part of this invention.

[0465] In another embodiment, the dsRNA is administered at a dose of about 0.5 to about 50 mg/kg, about 0.75 to about 50 mg/kg, about 1 to about 50 mg/kg, about 1.5 to about 50 mg/kg, about 2 to about 50 mg/kg, about 2.5 to about 50 mg/kg, about 3 to about 50 mg/kg, about 3.5 to about 50 mg/kg, about 4 to about 50 mg/kg, about 4.5 to about 50 mg/kg, about 5 to about 50 mg/kg, about 7.5 to about 50 mg/kg, about 10 to about 50 mg/kg, about 15 to about 50 mg/kg, about 20 to about 50 mg/kg, about 20 to about 50 mg/kg, about 25 to about 50 mg/kg, about 25 to about 50 mg/kg, about 30 to about 50 mg/kg, about 35 to about 50 mg/kg, about 40 to about 50 mg/kg, about 45 to about 50 mg/kg, about 0.5 to about 45 mg/kg, about 0.75 to about 45 mg/kg, about 1 to about 45 mg/kg, about 1.5 to about 45 mg/kg, about 2 to about 45 mg/kg, about 2.5 to about 45 mg/kg, about 3 to about 45 mg/kg, about 3.5 to about 45 mg/kg, about 4 to about 45 mg/kg, about 4.5 to about 45 mg/kg, about 5 to about 45 mg/kg, about 7.5 to about 45 mg/kg, about 10 to about 45 mg/kg, about 15 to about 45 mg/kg, about 20 to about 45 mg/kg, about 20 to about 45 mg/kg, about 25 to about 45 mg/kg, about 25 to about 45 mg/kg, about 30 to about 45 mg/kg, about 35 to about 45 mg/kg, about 40 to about 45 mg/kg, about 0.5 to about 40 mg/kg, about 0.75 to about 40 mg/kg, about 1 to about 40 mg/kg, about 1.5 to about 40 mg/kg, about 2 to about 40 mg/kg, about 2.5 to about 40 mg/kg, about 3 to about 40 mg/kg, about 3.5 to about 40 mg/kg, about 4 to about 40 mg/kg, about 4.5 to about 40 mg/kg, about 5 to about 40 mg/kg, about 7.5 to about 40 mg/kg, about 10 to about 40 mg/kg, about 15 to about 40 mg/kg, about 20 to about 40 mg/kg, about 20 to about 40 mg/kg, about 25 to about 40 mg/kg, about 25 to about 40 mg/kg, about 30 to about 40 mg/kg, about 35 to about 40 mg/kg, about 0.5 to about 30 mg/kg, about 0.75 to about 30 mg/kg, about 1 to about 30 mg/kg, about 1.5 to about 30 mg/kg, about 2 to about 30 mg/kg, about 2.5 to about 30 mg/kg, about 3 to about 30 mg/kg, about 3.5 to about 30 mg/kg, about 4 to about 30 mg/kg, about 4.5 to about 30 mg/kg, about 5 to about 30 mg/kg, about 7.5 to about 30 mg/kg, about 10 to about 30 mg/kg, about 15 to about 30 mg/kg, about 20 to about 30 mg/kg, about 20 to about 30 mg/kg, about 25 to about 30 mg/kg, about 0.5 to about 20 mg/kg, about 0.75 to about 20 mg/kg, about 1 to about 20 mg/kg, about 1.5 to about 20 mg/kg, about 2 to about 20 mg/kg, about 2.5 to about 20 mg/kg, about 3 to about 20 mg/kg, about 3.5 to about 20 mg/kg, about 4 to about 20 mg/kg, about 4.5 to about 20 mg/kg, about 5 to about 20 mg/kg, about 7.5 to about 20 mg/kg, about 10 to about 20 mg/kg, or about 15 to about 20 mg/kg. In one embodiment, the dsRNA is administered at a dose of about 10 mg/kg to about 30 mg/kg. Values and ranges intermediate to the recited values are also intended to be part of this invention.

[0466] For example, subjects can be administered, e.g., subcutaneously or intravenously, a single therapeutic amount of iRNA, such as about 0.1, 0.125, 0.15, 0.175, 0.2, 0.225, 0.25, 0.275, 0.3, 0.325, 0.35, 0.375, 0.4, 0.425, 0.45, 0.475, 0.5, 0.525, 0.55, 0.575, 0.6, 0.625, 0.65, 0.675, 0.7, 0.725, 0.75, 0.775, 0.8, 0.825, 0.85, 0.875, 0.9, 0.925, 0.95, 0.975, 1, 1.1, 1.2, 1.3, 1.4, 1.5, 1.6, 1.7, 1.8, 1.9, 2, 2.1, 2.2, 2.3, 2.4, 2.5, 2.6, 2.7, 2.8, 2.9, 3, 3.1, 3.2, 3.3, 3.4, 3.5, 3.6, 3.7, 3.8, 3.9, 4, 4.1, 4.2, 4.3, 4.4, 4.5, 4.6, 4.7, 4.8, 4.9, 5, 5.1, 5.2, 5.3, 5.4, 5.5, 5.6, 5.7, 5.8, 5.9, 6, 6.1, 6.2, 6.3, 6.4, 6.5, 6.6, 6.7, 6.8, 6.9, 7, 7.1, 7.2, 7.3, 7.4, 7.5, 7.6, 7.7, 7.8, 7.9, 8, 8.1, 8.2, 8.3, 8.4, 8.5, 8.6, 8.7, 8.8, 8.9, 9, 9.1, 9.2, 9.3, 9.4, 9.5, 9.6, 9.7, 9.8, 9.9, 10, 10.5, 11, 11.5, 12, 12.5, 13, 13.5, 14, 14.5, 15, 15.5, 16, 16.5, 17, 17.5, 18, 18.5, 19, 19.5, 20, 20.5, 21, 21.5, 22, 22.5, 23, 23.5, 24, 24.5, 25, 25.5, 26, 26.5, 27, 27.5, 28, 28.5, 29, 29.5, 30, 31, 32, 33, 34, 34, 35, 36, 37, 38, 39, 40, 41, 42, 43, 44, 45, 46, 47, 48, 49, or about 50 mg/kg. Values and ranges intermediate to the recited values are also intended to be part of this invention.

[0467] In some embodiments, subjects are administered, e.g., subcutaneously or intravenously, multiple doses of a therapeutic amount of iRNA, such as a dose about 0.1, 0.125, 0.15, 0.175, 0.2, 0.225, 0.25, 0.275, 0.3, 0.325, 0.35, 0.375, 0.4, 0.425, 0.45, 0.475, 0.5, 0.525, 0.55, 0.575, 0.6, 0.625, 0.65, 0.675, 0.7, 0.725, 0.75, 0.775, 0.8, 0.825, 0.85, 0.875, 0.9, 0.925, 0.95, 0.975, 1, 1.1, 1.2, 1.3, 1.4, 1.5, 1.6, 1.7, 1.8, 1.9, 2, 2.1, 2.2, 2.3, 2.4, 2.5, 2.6, 2.7, 2.8, 2.9, 3, 3.1, 3.2, 3.3, 3.4, 3.5, 3.6, 3.7, 3.8, 3.9, 4, 4.1, 4.2, 4.3, 4.4, 4.5, 4.6, 4.7, 4.8, 4.9, 5, 5.1, 5.2, 5.3, 5.4, 5.5, 5.6, 5.7, 5.8, 5.9, 6, 6.1, 6.2, 6.3, 6.4, 6.5, 6.6, 6.7, 6.8, 6.9, 7, 7.1, 7.2, 7.3, 7.4, 7.5, 7.6, 7.7, 7.8, 7.9, 8, 8.1, 8.2, 8.3, 8.4, 8.5, 8.6, 8.7, 8.8, 8.9, 9, 9.1, 9.2, 9.3, 9.4, 9.5, 9.6, 9.7, 9.8, 9.9, 10, 10.5, 11, 11.5, 12, 12.5, 13, 13.5, 14, 14.5, 15, 15.5, 16, 16.5, 17, 17.5, 18, 18.5, 19, 19.5, 20, 20.5, 21, 21.5, 22, 22.5, 23, 23.5, 24, 24.5, 25, 25.5, 26, 26.5, 27, 27.5, 28, 28.5, 29, 29.5, 30, 31, 32, 33, 34, 34, 35, 36, 37, 38, 39, 40, 41, 42, 43, 44, 45, 46, 47, 48, 49, or about 50 mg/kg. A multi-dose regimine may include administration of a therapeutic amount of iRNA daily, such as for two days, three days, four days, five days, six days, seven days, or longer.

[0468] In other embodiments, subjects are administered, e.g., subcutaneously or intravenously, a repeat dose of a therapeutic amount of iRNA, such as a dose about 0.1, 0.125, 0.15, 0.175, 0.2, 0.225, 0.25, 0.275, 0.3, 0.325, 0.35, 0.375, 0.4, 0.425, 0.45, 0.475, 0.5, 0.525, 0.55, 0.575, 0.6, 0.625, 0.65, 0.675, 0.7, 0.725, 0.75, 0.775, 0.8, 0.825, 0.85, 0.875, 0.9, 0.925, 0.95, 0.975, 1, 1.1, 1.2, 1.3, 1.4, 1.5, 1.6, 1.7, 1.8, 1.9, 2, 2.1, 2.2, 2.3, 2.4, 2.5, 2.6, 2.7, 2.8, 2.9, 3, 3.1, 3.2, 3.3, 3.4, 3.5, 3.6, 3.7, 3.8, 3.9, 4, 4.1, 4.2, 4.3, 4.4, 4.5, 4.6, 4.7, 4.8, 4.9, 5, 5.1, 5.2, 5.3, 5.4, 5.5, 5.6, 5.7, 5.8, 5.9, 6, 6.1, 6.2, 6.3, 6.4, 6.5, 6.6, 6.7, 6.8, 6.9, 7, 7.1, 7.2, 7.3, 7.4, 7.5, 7.6, 7.7, 7.8, 7.9, 8, 8.1, 8.2, 8.3, 8.4, 8.5, 8.6, 8.7, 8.8, 8.9, 9, 9.1, 9.2, 9.3, 9.4, 9.5, 9.6, 9.7, 9.8, 9.9, 10, 10.5, 11, 11.5, 12, 12.5, 13, 13.5, 14, 14.5, 15, 15.5, 16, 16.5, 17, 17.5, 18, 18.5, 19, 19.5, 20, 20.5, 21, 21.5, 22, 22.5, 23, 23.5, 24, 24.5, 25, 25.5, 26, 26.5, 27, 27.5, 28, 28.5, 29, 29.5, 30, 31, 32, 33, 34, 34, 35, 36, 37, 38, 39, 40, 41, 42, 43, 44, 45, 46, 47, 48, 49, or about 50 mg/kg. A repeat-dose regimine may include administration of a therapeutic amount of iRNA on a regular basis, such as every other day, every third day, every fourth day, twice a week, once a week, every other week, or once a month. In certain embodiments, the iRNA is administered about once per month to about once per quarter (i.e., about once every three months).

[0469] After an initial treatment regimen, the treatments can be administered on a less frequent basis.

[0470] In certain embodiments, for example, when a composition of the invention comprises a dsRNA as described herein and a lipid, subjects can be administered a therapeutic amount of iRNA, such as about 0.01 mg/kg to about 5 mg/kg, about 0.01 mg/kg to about 10 mg/kg, about 0.05 mg/kg to about 5 mg/kg, about 0.05 mg/kg to about 10 mg/kg, about 0.1 mg/kg to about 5 mg/kg, about 0.1 mg/kg to about 10 mg/kg, about 0.2 mg/kg to about 5 mg/kg, about 0.2 mg/kg to about 10 mg/kg, about 0.3 mg/kg to about 5 mg/kg, about 0.3 mg/kg to about 10 mg/kg, about 0.4 mg/kg to about 5 mg/kg, about 0.4 mg/kg to about 10 mg/kg, about 0.5 mg/kg to about 5 mg/kg, about 0.5 mg/kg to about 10 mg/kg, about 1 mg/kg to about 5 mg/kg, about 1 mg/kg to about 10 mg/kg, about 1.5 mg/kg to about 5 mg/kg, about 1.5 mg/kg to about 10 mg/kg, about 2 mg/kg to about 2.5 mg/kg, about 2 mg/kg to about 10 mg/kg, about 3 mg/kg to about 5 mg/kg, about 3 mg/kg to about 10 mg/kg, about 3.5 mg/kg to about 5 mg/kg, about 4 mg/kg to about 5 mg/kg, about 4.5 mg/kg to about 5 mg/kg, about 4 mg/kg to about 10 mg/kg, about 4.5 mg/kg to about 10 mg/kg, about 5 mg/kg to about 10 mg/kg, about 5.5 mg/kg to about 10 mg/kg, about 6 mg/kg to about 10 mg/kg, about 6.5 mg/kg to about 10 mg/kg, about 7 mg/kg to about 10 mg/kg, about 7.5 mg/kg to about 10 mg/kg, about 8 mg/kg to about 10 mg/kg, about 8.5 mg/kg to about 10 mg/kg, about 9 mg/kg to about 10 mg/kg, or about 9.5 mg/kg to about 10 mg/kg. Values and ranges intermediate to the recited values are also intended to be part of this invention.

[0471] For example, the dsRNA may be administered at a dose of about 0.1, 0.2, 0.3, 0.4, 0.5, 0.6, 0.7, 0.8, 0.9, 1, 1.1, 1.2, 1.3, 1.4, 1.5, 1.6, 1.7, 1.8, 1.9, 2, 2.1, 2.2, 2.3, 2.4, 2.5, 2.6, 2.7, 2.8, 2.9, 3, 3.1, 3.2, 3.3, 3.4, 3.5, 3.6, 3.7, 3.8, 3.9, 4, 4.1, 4.2, 4.3, 4.4, 4.5, 4.6, 4.7, 4.8, 4.9, 5, 5.1, 5.2, 5.3, 5.4, 5.5, 5.6, 5.7, 5.8, 5.9, 6, 6.1, 6.2, 6.3, 6.4, 6.5, 6.6, 6.7, 6.8, 6.9, 7, 7.1, 7.2, 7.3, 7.4, 7.5, 7.6, 7.7, 7.8, 7.9, 8, 8.1, 8.2, 8.3, 8.4, 8.5, 8.6, 8.7, 8.8, 8.9, 9, 9.1, 9.2, 9.3, 9.4, 9.5, 9.6, 9.7, 9.8, 9.9, or about 10 mg/kg. Values and ranges intermediate to the recited values are also intended to be part of this invention.

[0472] In certain embodiments of the invention, for example, when a double-stranded RNAi agent includes a modification (e.g., one or more motifs of three identical modifications on three consecutive nucleotides), including one such motif at or near the cleavage site of the agent, six phosphorothioate linkages, and a ligand, such an agent is administered at a dose of about 0.01 to about 0.5 mg/kg, about 0.01 to about 0.4 mg/kg, about 0.01 to about 0.3 mg/kg, about 0.01 to about 0.2 mg/kg, about 0.01 to about 0.1 mg/kg, about 0.01 mg/kg to about 0.09 mg/kg, about 0.01 mg/kg to about 0.08 mg/kg, about 0.01 mg/kg to about 0.07 mg/kg, about 0.01 mg/kg to about 0.06 mg/kg, about 0.01 mg/kg to about 0.05 mg/kg, about 0.02 to about 0.5 mg/kg, about 0.02 to about 0.4 mg/kg, about 0.02 to about 0.3 mg/kg, about 0.02 to about 0.2 mg/kg, about 0.02 to about 0.1 mg/kg, about 0.02 mg/kg to about 0.09 mg/kg, about 0.02 mg/kg to about 0.08 mg/kg, about 0.02 mg/kg to about 0.07 mg/kg, about 0.02 mg/kg to about 0.06 mg/kg, about 0.02 mg/kg to about 0.05 mg/kg, about 0.03 to about 0.5 mg/kg, about 0.03 to about 0.4 mg/kg, about 0.03 to about 0.3 mg/kg, about 0.03 to about 0.2 mg/kg, about 0.03 to about 0.1 mg/kg, about 0.03 mg/kg to about 0.09 mg/kg, about 0.03 mg/kg to about 0.08 mg/kg, about 0.03 mg/kg to about 0.07 mg/kg, about 0.03 mg/kg to about 0.06 mg/kg, about 0.03 mg/kg to about 0.05 mg/kg, about 0.04 to about 0.5 mg/kg, about 0.04 to about 0.4 mg/kg, about 0.04 to about 0.3 mg/kg, about 0.04 to about 0.2 mg/kg, about 0.04 to about 0.1 mg/kg, about 0.04 mg/kg to about 0.09 mg/kg, about 0.04 mg/kg to about 0.08 mg/kg, about 0.04 mg/kg to about 0.07 mg/kg, about 0.04 mg/kg to about 0.06 mg/kg, about 0.05 to about 0.5 mg/kg, about 0.05 to about 0.4 mg/kg, about 0.05 to about 0.3 mg/kg, about 0.05 to about 0.2 mg/kg, about 0.05 to about 0.1 mg/kg, about 0.05 mg/kg to about 0.09 mg/kg, about 0.05 mg/kg to about 0.08 mg/kg, or about 0.05 mg/kg to about 0.07 mg/kg. Values and ranges intermediate to the foregoing recited values are also intended to be part of this invention, e.g., the RNAi agent may be administered to the subject at a dose of about 0.015 mg/kg to about 0.45 mg/kg.

[0473] For example, the RNAi agent, e.g., RNAi agent in a pharmaceutical composition, may be administered at a dose of about 0.01 mg/kg, 0.0125 mg/kg, 0.015 mg/kg, 0.0175 mg/kg, 0.02 mg/kg, 0.0225 mg/kg, 0.025 mg/kg, 0.0275 mg/kg, 0.03 mg/kg, 0.0325 mg/kg, 0.035 mg/kg, 0.0375 mg/kg, 0.04 mg/kg, 0.0425 mg/kg, 0.045 mg/kg, 0.0475 mg/kg, 0.05 mg/kg, 0.0525 mg/kg, 0.055 mg/kg, 0.0575 mg/kg, 0.06 mg/kg, 0.0625 mg/kg, 0.065 mg/kg, 0.0675 mg/kg, 0.07 mg/kg, 0.0725 mg/kg, 0.075 mg/kg, 0.0775 mg/kg, 0.08 mg/kg, 0.0825 mg/kg, 0.085 mg/kg, 0.0875 mg/kg, 0.09 mg/kg, 0.0925 mg/kg, 0.095 mg/kg, 0.0975 mg/kg, 0.1 mg/kg, 0.125 mg/kg, 0.15 mg/kg, 0.175 mg/kg, 0.2 mg/kg, 0.225 mg/kg, 0.25 mg/kg, 0.275 mg/kg, 0.3 mg/kg, 0.325 mg/kg, 0.35 mg/kg, 0.375 mg/kg, 0.4 mg/kg, 0.425 mg/kg, 0.45 mg/kg, 0.475 mg/kg, or about 0.5 mg/kg. Values intermediate to the foregoing recited values are also intended to be part of this invention.

[0474] The pharmaceutical composition can be administered by intravenous infusion over a period of time, such as over a 5, 6, 7, 8, 9, 10, 11, 12, 13, 14, 15, 16, 17, 18, 19, 20, and 21, 22, 23, 24, or about a 25 minute period. The administration may be repeated, for example, on a regular basis, such as weekly, biweekly (i.e., every two weeks) for one month, two months, three months, four months or longer. After an initial treatment regimen, the treatments can be administered on a less frequent basis. For example, after administration weekly or biweekly for three months, administration can be repeated once per month, for six months or a year or longer.

[0475] The pharmaceutical composition can be administered by subcutaneous administration.

[0476] The pharmaceutical composition can be administered once daily, or the iRNA can be administered as two, three, or more sub-doses at appropriate intervals throughout the day or even using continuous infusion or delivery through a controlled release formulation. In that case, the iRNA contained in each sub-dose must be correspondingly smaller in order to achieve the total daily dosage. The dosage unit can also be compounded for delivery over several days, e.g., using a conventional sustained release formulation which provides sustained release of the iRNA over a several day period. Sustained release formulations are well known in the art and are particularly useful for delivery of agents at a particular site, such as could be used with the agents of the present invention. In this embodiment, the dosage unit contains a corresponding multiple of the daily dose. A higher dose may be administered initially (i.e., a loading dose), followed by a lower dosage for a sustained period of time.

[0477] In other embodiments, a single dose of the pharmaceutical compositions can be long lasting, such that subsequent doses are administered at not more than 3, 4, or 5 day intervals, or at not more than 1, 2, 3, or 4 week intervals. In some embodiments of the invention, a single dose of the pharmaceutical compositions of the invention is administered once per week. In other embodiments of the invention, a single dose of the pharmaceutical compositions of the invention is administered bi-monthly. In certain embodiments, the iRNA is administered about once per month to about once per quarter (i.e., about once every three months).

[0478] The pharmaceutical composition can be administered for an indefinite period of time, e.g., in a subject experiencing elevated blood pressure due to obesity, or during the time at which the cause of an elevated level of AGT is present, e.g., during pregnancy induced high blood pressure.

[0479] The skilled artisan will appreciate that certain factors can influence the dosage and timing required to effectively treat a subject, including but not limited to the severity of the disease or disorder, previous treatments, the general health and/or age of the subject, and other diseases present. Moreover, treatment of a subject with a therapeutically effective amount of a composition can include a single treatment or a series of treatments. Estimates of effective dosages and in vivo half-lives for the individual iRNAs encompassed by the invention can be made using conventional methodologies or on the basis of in vivo testing using an appropriate animal model, as described elsewhere herein.

[0480] The pharmaceutical compositions of the present invention can be administered in a number of ways depending upon whether local or systemic treatment is desired and upon the area to be treated. Administration can be topical (e.g., by a transdermal patch), pulmonary, e.g., by inhalation or insufflation of powders or aerosols, including by nebulizer; intratracheal, intranasal, epidermal and transdermal, oral or parenteral. Parenteral administration includes intravenous, intraarterial, subcutaneous, intraperitoneal or intramuscular injection or infusion; subdermal, e.g., via an implanted device; or intracranial, e.g., by intraparenchymal, intrathecal or intraventricular, administration.

[0481] The iRNA can be delivered in a manner to target a particular tissue, such as the liver (e.g., the hepatocytes of the liver).

[0482] Pharmaceutical compositions and formulations for topical administration can include transdermal patches, ointments, lotions, creams, gels, drops, suppositories, sprays, liquids and powders. Conventional pharmaceutical carriers, aqueous, powder or oily bases, thickeners and the like can be necessary or desirable. Coated condoms, gloves and the like can also be useful. Suitable topical formulations include those in which the iRNAs featured in the invention are in admixture with a topical delivery agent such as lipids, liposomes, fatty acids, fatty acid esters, steroids, chelating agents and surfactants. Suitable lipids and liposomes include neutral (e.g., dioleoylphosphatidyl DOPE ethanolamine, dimyristoylphosphatidyl choline DMPC, distearolyphosphatidyl choline) negative (e.g., dimyristoylphosphatidyl glycerol DMPG) and cationic (e.g., dioleoyltetramethylaminopropyl DOTAP and dioleoylphosphatidyl ethanolamine DOTMA). iRNAs featured in the invention can be encapsulated within liposomes or can form complexes thereto, in particular to cationic liposomes. Alternatively, iRNAs can be complexed to lipids, in particular to cationic lipids. Suitable fatty acids and esters include but are not limited to arachidonic acid, oleic acid, eicosanoic acid, lauric acid, caprylic acid, capric acid, myristic acid, palmitic acid, stearic acid, linoleic acid, linolenic acid, dicaprate, tricaprate, monoolein, dilaurin, glyceryl 1-monocaprate, 1-dodecylazacycloheptan-2-one, an acylcarnitine, an acylcholine, or a C₁₋₂₀ alkyl ester (e.g., isopropylmyristate IPM), monoglyceride, diglyceride or pharmaceutically acceptable salt thereof). Topical formulations are described in detail in U.S. Pat. No. 6,747,014, which is incorporated herein by reference.

[0483] A. iRNA Formulations Comprising Membranous Molecular Assemblies

[0484] An iRNA for use in the compositions and methods of the invention can be formulated for delivery in a membranous molecular assembly, e.g., a liposome or a micelle. As used herein, the term “liposome” refers to a vesicle composed of amphiphilic lipids arranged in at least one bilayer, e.g., one bilayer or a plurality of bilayers. Liposomes include unilamellar and multilamellar vesicles that have a membrane formed from a lipophilic material and an aqueous interior. The aqueous portion contains the iRNA composition. The lipophilic material isolates the aqueous interior from an aqueous exterior, which typically does not include the iRNA composition, although in some examples, it may. Liposomes are useful for the transfer and delivery of active ingredients to the site of action. Because the liposomal membrane is structurally similar to biological membranes, when liposomes are applied to a tissue, the liposomal bilayer fuses with bilayer of the cellular membranes. As the merging of the liposome and cell progresses, the internal aqueous contents that include the iRNA are delivered into the cell where the iRNA can specifically bind to a target RNA and can mediate iRNA. In some cases the liposomes are also specifically targeted, e.g., to direct the iRNA to particular cell types.

[0485] A liposome containing an iRNA agent can be prepared by a variety of methods. In one example, the lipid component of a liposome is dissolved in a detergent so that micelles are formed with the lipid component. For example, the lipid component can be an amphipathic cationic lipid or lipid conjugate. The detergent can have a high critical micelle concentration and may be nonionic. Exemplary detergents include cholate, CHAPS, octylglucoside, deoxycholate, and lauroyl sarcosine. The iRNA agent preparation is then added to the micelles that include the lipid component. The cationic groups on the lipid interact with the iRNA agent and condense around the iRNA agent to form a liposome. After condensation, the detergent is removed, e.g., by dialysis, to yield a liposomal preparation of iRNA agent.

[0486] If necessary a carrier compound that assists in condensation can be added during the condensation reaction, e.g., by controlled addition. For example, the carrier compound can be a polymer other than a nucleic acid (e.g., spermine or spermidine). pH can also adjusted to favor condensation.

[0487] Methods for producing stable polynucleotide delivery vehicles, which incorporate a polynucleotide/cationic lipid complex as structural components of the delivery vehicle, are further described in, e.g., WO 96/37194, the entire contents of which are incorporated herein by reference. Liposome formation can also include one or more aspects of exemplary methods described in Felgner, P. L. et al., Proc. Natl. Acad. Sci., USA 8:7413-7417, 1987; U.S. Pat. Nos. 4,897,355; 5,171,678; Bangham, et al. M. Mol. Biol. 23:238, 1965; Olson, et al. Biochim. Biophys. Acta 557:9, 1979; Szoka, et al. Proc. Natl. Acad. Sci. 75: 4194, 1978; Mayhew, et al. Biochim. Biophys. Acta 775:169, 1984; Kim, et al. Biochim. Biophys. Acta 728:339, 1983; and Fukunaga, et al. Endocrinol. 115:757, 1984. Commonly used techniques for preparing lipid aggregates of appropriate size for use as delivery vehicles include sonication and freeze-thaw plus extrusion (see, e.g., Mayer, et al. Biochim. Biophys. Acta 858:161, 1986). Microfluidization can be used when consistently small (50 to 200 nm) and relatively uniform aggregates are desired (Mayhew, et al. Biochim. Biophys. Acta 775:169, 1984). These methods are readily adapted to packaging iRNA agent preparations into liposomes.

[0488] Liposomes fall into two broad classes. Cationic liposomes are positively charged liposomes which interact with the negatively charged nucleic acid molecules to form a stable complex. The positively charged nucleic acid/liposome complex binds to the negatively charged cell surface and is internalized in an endosome. Due to the acidic pH within the endosome, the liposomes are ruptured, releasing their contents into the cell cytoplasm (Wang et al., Biochem. Biophys. Res. Commun., 1987, 147, 980-985).

[0489] Liposomes which are pH-sensitive or negatively-charged, entrap nucleic acids rather than complex with it. Since both the nucleic acid and the lipid are similarly charged, repulsion rather than complex formation occurs. Nevertheless, some nucleic acid is entrapped within the aqueous interior of these liposomes. pH-sensitive liposomes have been used to deliver nucleic acids encoding the thymidine kinase gene to cell monolayers in culture. Expression of the exogenous gene was detected in the target cells (Zhou et al., Journal of Controlled Release, 1992, 19, 269-274).

[0490] One major type of liposomal composition includes phospholipids other than naturally-derived phosphatidylcholine. Neutral liposome compositions, for example, can be formed from dimyristoyl phosphatidylcholine (DMPC) or dipalmitoyl phosphatidylcholine (DPPC). Anionic liposome compositions generally are formed from dimyristoyl phosphatidylglycerol, while anionic fusogenic liposomes are formed primarily from dioleoyl phosphatidylethanolamine (DOPE). Another type of liposomal composition is formed from phosphatidylcholine (PC) such as, for example, soybean PC, and egg PC. Another type is formed from mixtures of phospholipid and/or phosphatidylcholine and/or cholesterol.

[0491] Examples of other methods to introduce liposomes into cells in vitro and in vivo include U.S. Pat. Nos. 5,283,185; 5,171,678; WO 94/00569; WO 93/24640; WO 91/16024; Felgner, J. Biol. Chem. 269:2550, 1994; Nabel, Proc. Natl. Acad. Sci. 90:11307, 1993; Nabel, Human Gene Ther. 3:649, 1992; Gershon, Biochem. 32:7143, 1993; and Strauss EMBO J. 11:417, 1992.

[0492] Non-ionic liposomal systems have also been examined to determine their utility in the delivery of drugs to the skin, in particular systems comprising non-ionic surfactant and cholesterol. Non-ionic liposomal formulations comprising Novasome™ I (glyceryl dilaurate/cholesterol/polyoxyethylene-10-stearyl ether) and Novasome™ II (glyceryl distearate/cholesterol/polyoxyethylene-10-stearyl ether) were used to deliver cyclosporin-A into the dermis of mouse skin. Results indicated that such non-ionic liposomal systems were effective in facilitating the deposition of cyclosporine A into different layers of the skin (Hu et al. S.T.P. Pharma. Sci., 1994, 4(6) 466).

[0493] Liposomes also include “sterically stabilized” liposomes, a term which, as used herein, refers to liposomes comprising one or more specialized lipids that, when incorporated into liposomes, result in enhanced circulation lifetimes relative to liposomes lacking such specialized lipids. Examples of sterically stabilized liposomes are those in which part of the vesicle-forming lipid portion of the liposome (A) comprises one or more glycolipids, such as monosialoganglioside G_{M}1, or (B) is derivatized with one or more hydrophilic polymers, such as a polyethylene glycol (PEG) moiety. While not wishing to be bound by any particular theory, it is thought in the art that, at least for sterically stabilized liposomes containing gangliosides, sphingomyelin, or PEG-derivatized lipids, the enhanced circulation half-life of these sterically stabilized liposomes derives from a reduced uptake into cells of the reticuloendothelial system (RES) (Allen et al., FEBS Letters, 1987, 223, 42; Wu et al., Cancer Research, 1993, 53, 3765).

[0494] Various liposomes comprising one or more glycolipids are known in the art. Papahadjopoulos et al. (Ann. N.Y. Acad. Sci., 1987, 507, 64) reported the ability of monosialoganglioside G_{M1}, galactocerebroside sulfate and phosphatidylinositol to improve blood half-lives of liposomes. These findings were expounded upon by Gabizon et al. (Proc. Natl. Acad. Sci. U.S.A., 1988, 85, 6949). U.S. Pat. No. 4,837,028 and WO 88/04924, both to Allen et al., disclose liposomes comprising (1) sphingomyelin and (2) the ganglioside G_{M1} or a galactocerebroside sulfate ester. U.S. Pat. No. 5,543,152 (Webb et al.) discloses liposomes comprising sphingomyelin. Liposomes comprising 1,2-sn-dimyristoylphosphatidylcholine are disclosed in WO 97/13499 (Lim et al).

[0495] In one embodiment, cationic liposomes are used. Cationic liposomes possess the advantage of being able to fuse to the cell membrane. Non-cationic liposomes, although not able to fuse as efficiently with the plasma membrane, are taken up by macrophages in vivo and can be used to deliver iRNA agents to macrophages.

[0496] Further advantages of liposomes include: liposomes obtained from natural phospholipids are biocompatible and biodegradable; liposomes can incorporate a wide range of water and lipid soluble drugs; liposomes can protect encapsulated iRNA agents in their internal compartments from metabolism and degradation (Rosoff, in “Pharmaceutical Dosage Forms,” Lieberman, Rieger and Banker (Eds.), 1988, volume 1, p. 245). Important considerations in the preparation of liposome formulations are the lipid surface charge, vesicle size and the aqueous volume of the liposomes.

[0497] A positively charged synthetic cationic lipid, N-[1-(2,3-dioleyloxy)propyl]-N,N,N-trimethylammonium chloride (DOTMA) can be used to form small liposomes that interact spontaneously with nucleic acid to form lipid-nucleic acid complexes which are capable of fusing with the negatively charged lipids of the cell membranes of tissue culture cells, resulting in delivery of iRNA agent (see, e.g., Felgner, P. L. et al., Proc. Natl. Acad. Sci., USA 8:7413-7417, 1987 and U.S. Pat. No. 4,897,355 for a description of DOTMA and its use with DNA).

[0498] A DOTMA analogue, 1,2-bis(oleoyloxy)-3-(trimethylammonia)propane (DOTAP) can be used in combination with a phospholipid to form DNA-complexing vesicles. Lipofectin™ Bethesda Research Laboratories, Gaithersburg, Md.) is an effective agent for the delivery of highly anionic nucleic acids into living tissue culture cells that comprise positively charged DOTMA liposomes which interact spontaneously with negatively charged polynucleotides to form complexes. When enough positively charged liposomes are used, the net charge on the resulting complexes is also positive. Positively charged complexes prepared in this way spontaneously attach to negatively charged cell surfaces, fuse with the plasma membrane, and efficiently deliver functional nucleic acids into, for example, tissue culture cells. Another commercially available cationic lipid, 1,2-bis(oleoyloxy)-3,3-(trimethylammonia)propane (“DOTAP”) (Boehringer Mannheim, Indianapolis, Ind.) differs from DOTMA in that the oleoyl moieties are linked by ester, rather than ether linkages.

[0499] Other reported cationic lipid compounds include those that have been conjugated to a variety of moieties including, for example, carboxyspermine which has been conjugated to one of two types of lipids and includes compounds such as 5-carboxyspermylglycine dioctaoleoylamide (“DOGS”) (Transfectam™, Promega, Madison, Wis.) and dipalmitoylphosphatidylethanolamine 5-carboxyspermyl-amide (“DPPES”) (see, e.g., U.S. Pat. No. 5,171,678).

[0500] Another cationic lipid conjugate includes derivatization of the lipid with cholesterol (“DC-Chol”) which has been formulated into liposomes in combination with DOPE (See, Gao, X. and Huang, L., Biochim. Biophys. Res. Commun. 179:280, 1991). Lipopolylysine, made by conjugating polylysine to DOPE, has been reported to be effective for transfection in the presence of serum (Zhou, X. et al., Biochim. Biophys. Acta 1065:8, 1991). For certain cell lines, these liposomes containing conjugated cationic lipids, are said to exhibit lower toxicity and provide more efficient transfection than the DOTMA-containing compositions. Other commercially available cationic lipid products include DMRIE and DMRIE-HP (Vical, La Jolla, Calif.) and Lipofectamine (DOSPA) (Life Technology, Inc., Gaithersburg, Md.). Other cationic lipids suitable for the delivery of oligonucleotides are described in WO 98/39359 and WO 96/37194.

[0501] Liposomal formulations are particularly suited for topical administration, liposomes present several advantages over other formulations. Such advantages include reduced side effects related to high systemic absorption of the administered drug, increased accumulation of the administered drug at the desired target, and the ability to administer iRNA agent into the skin. In some implementations, liposomes are used for delivering iRNA agent to epidermal cells and also to enhance the penetration of iRNA agent into dermal tissues, e.g., into skin. For example, the liposomes can be applied topically. Topical delivery of drugs formulated as liposomes to the skin has been documented (see, e.g., Weiner et al., Journal of Drug Targeting, 1992, vol. 2,405-410 and du Plessis et al., Antiviral Research, 18, 1992, 259-265; Mannino, R. J. and Fould-Fogerite, S., Biotechniques 6:682-690, 1988; Itani, T. et al. Gene 56:267-276. 1987; Nicolau, C. et al. Meth. Enz. 149:157-176, 1987; Straubinger, R. M. and Papahadjopoulos, D. Meth. Enz. 101:512-527, 1983; Wang, C. Y. and Huang, L., Proc. Natl. Acad. Sci. USA 84:7851-7855, 1987).

[0502] Non-ionic liposomal systems have also been examined to determine their utility in the delivery of drugs to the skin, in particular systems comprising non-ionic surfactant and cholesterol. Non-ionic liposomal formulations comprising Novasome I (glyceryl dilaurate/cholesterol/polyoxyethylene-10-stearyl ether) and Novasome II (glyceryl distearate/cholesterol/polyoxyethylene-10-stearyl ether) were used to deliver a drug into the dermis of mouse skin. Such formulations with iRNA agent are useful for treating a dermatological disorder.

[0503] Liposomes that include iRNA can be made highly deformable. Such deformability can enable the liposomes to penetrate through pore that are smaller than the average radius of the liposome. For example, transfersomes are a type of deformable liposomes. Transferosomes can be made by adding surface edge activators, usually surfactants, to a standard liposomal composition. Transfersomes that include iRNA agent can be delivered, for example, subcutaneously by infection in order to deliver iRNA agent to keratinocytes in the skin. In order to cross intact mammalian skin, lipid vesicles must pass through a series of fine pores, each with a diameter less than 50 nm, under the influence of a suitable transdermal gradient. In addition, due to the lipid properties, these transferosomes can be self-optimizing (adaptive to the shape of pores, e.g., in the skin), self-repairing, and can frequently reach their targets without fragmenting, and often self-loading.

[0504] Other formulations amenable to the present invention are described in U.S. provisional application Ser. No. 61/018,616, filed Jan. 2, 2008; 61/018,611, filed Jan. 2, 2008; 61/039,748, filed Mar. 26, 2008; 61/047,087, filed Apr. 22, 2008 and 61/051,528, filed May 8, 2008. PCT application no PCT/US2007/080331, filed Oct. 3, 2007 also describes formulations that are amenable to the present invention.

[0505] Transfersomes are yet another type of liposomes, and are highly deformable lipid aggregates which are attractive candidates for drug delivery vehicles. Transfersomes can be described as lipid droplets which are so highly deformable that they are easily able to penetrate through pores which are smaller than the droplet. Transfersomes are adaptable to the environment in which they are used, e.g., they are self-optimizing (adaptive to the shape of pores in the skin), self-repairing, frequently reach their targets without fragmenting, and often self-loading. To make transfersomes it is possible to add surface edge-activators, usually surfactants, to a standard liposomal composition. Transfersomes have been used to deliver serum albumin to the skin. The transfersome-mediated delivery of serum albumin has been shown to be as effective as subcutaneous injection of a solution containing serum albumin.

[0506] Surfactants find wide application in formulations such as emulsions (including microemulsions) and liposomes. The most common way of classifying and ranking the properties of the many different types of surfactants, both natural and synthetic, is by the use of the hydrophile/lipophile balance (HLB). The nature of the hydrophilic group (also known as the “head”) provides the most useful means for categorizing the different surfactants used in formulations (Rieger, in “Pharmaceutical Dosage Forms”, Marcel Dekker, Inc., New York, N.Y., 1988, p. 285).

[0507] If the surfactant molecule is not ionized, it is classified as a nonionic surfactant. Nonionic surfactants find wide application in pharmaceutical and cosmetic products and are usable over a wide range of pH values. In general their HLB values range from 2 to about 18 depending on their structure. Nonionic surfactants include nonionic esters such as ethylene glycol esters, propylene glycol esters, glyceryl esters, polyglyceryl esters, sorbitan esters, sucrose esters, and ethoxylated esters. Nonionic alkanolamides and ethers such as fatty alcohol ethoxylates, propoxylated alcohols, and ethoxylated/propoxylated block polymers are also included in this class. The polyoxyethylene surfactants are the most popular members of the nonionic surfactant class.

[0508] If the surfactant molecule carries a negative charge when it is dissolved or dispersed in water, the surfactant is classified as anionic. Anionic surfactants include carboxylates such as soaps, acyl lactylates, acyl amides of amino acids, esters of sulfuric acid such as alkyl sulfates and ethoxylated alkyl sulfates, sulfonates such as alkyl benzene sulfonates, acyl isethionates, acyl taurates and sulfosuccinates, and phosphates. The most important members of the anionic surfactant class are the alkyl sulfates and the soaps.

[0509] If the surfactant molecule carries a positive charge when it is dissolved or dispersed in water, the surfactant is classified as cationic. Cationic surfactants include quaternary ammonium salts and ethoxylated amines. The quaternary ammonium salts are the most used members of this class.

[0510] If the surfactant molecule has the ability to carry either a positive or negative charge, the surfactant is classified as amphoteric. Amphoteric surfactants include acrylic acid derivatives, substituted alkylamides, N-alkylbetaines and phosphatides.

[0511] The use of surfactants in drug products, formulations and in emulsions has been reviewed (Rieger, in “Pharmaceutical Dosage Forms”, Marcel Dekker, Inc., New York, N.Y., 1988, p. 285).

[0512] The iRNA for use in the methods of the invention can also be provided as micellar formulations. “Micelles” are defined herein as a particular type of molecular assembly in which amphipathic molecules are arranged in a spherical structure such that all the hydrophobic portions of the molecules are directed inward, leaving the hydrophilic portions in contact with the surrounding aqueous phase. The converse arrangement exists if the environment is hydrophobic.

[0513] A mixed micellar formulation suitable for delivery through transdermal membranes may be prepared by mixing an aqueous solution of the siRNA composition, an alkali metal C₈ to C₂₂ alkyl sulphate, and a micelle forming compounds. Exemplary micelle forming compounds include lecithin, hyaluronic acid, pharmaceutically acceptable salts of hyaluronic acid, glycolic acid, lactic acid, chamomile extract, cucumber extract, oleic acid, linoleic acid, linolenic acid, monoolein, monooleates, monolaurates, borage oil, evening of primrose oil, menthol, trihydroxy oxo cholanyl glycine and pharmaceutically acceptable salts thereof, glycerin, polyglycerin, lysine, polylysine, triolein, polyoxyethylene ethers and analogues thereof, polidocanol alkyl ethers and analogues thereof, chenodeoxycholate, deoxycholate, and mixtures thereof. The micelle forming compounds may be added at the same time or after addition of the alkali metal alkyl sulphate. Mixed micelles will form with substantially any kind of mixing of the ingredients but vigorous mixing in order to provide smaller size micelles.

[0514] In one method a first micellar composition is prepared which contains the siRNA composition and at least the alkali metal alkyl sulphate. The first micellar composition is then mixed with at least three micelle forming compounds to form a mixed micellar composition. In another method, the micellar composition is prepared by mixing the siRNA composition, the alkali metal alkyl sulphate and at least one of the micelle forming compounds, followed by addition of the remaining micelle forming compounds, with vigorous mixing.

[0515] Phenol and/or m-cresol may be added to the mixed micellar composition to stabilize the formulation and protect against bacterial growth. Alternatively, phenol and/or m-cresol may be added with the micelle forming ingredients. An isotonic agent such as glycerin may also be added after formation of the mixed micellar composition.

[0516] For delivery of the micellar formulation as a spray, the formulation can be put into an aerosol dispenser and the dispenser is charged with a propellant. The propellant, which is under pressure, is in liquid form in the dispenser. The ratios of the ingredients are adjusted so that the aqueous and propellant phases become one, i.e., there is one phase. If there are two phases, it is necessary to shake the dispenser prior to dispensing a portion of the contents, e.g., through a metered valve. The dispensed dose of pharmaceutical agent is propelled from the metered valve in a fine spray.

[0517] Propellants may include hydrogen-containing chlorofluorocarbons, hydrogen-containing fluorocarbons, dimethyl ether and diethyl ether. In certain embodiments, HFA 134a (1,1,1,2 tetrafluoroethane) may be used.

[0518] The specific concentrations of the essential ingredients can be determined by relatively straightforward experimentation. For absorption through the oral cavities, it is often desirable to increase, e.g., at least double or triple, the dosage for through injection or administration through the gastrointestinal tract.

[0519] B. Lipid Particles

[0520] iRNAs, e.g., dsRNAs of in the invention may be fully encapsulated in a lipid formulation, e.g., a LNP, or other nucleic acid-lipid particle.

[0521] As used herein, the term “LNP” refers to a stable nucleic acid-lipid particle. LNPs typically contain a cationic lipid, a non-cationic lipid, and a lipid that prevents aggregation of the particle (e.g., a PEG-lipid conjugate). LNPs are extremely useful for systemic applications, as they exhibit extended circulation lifetimes following intravenous (i.v.) injection and accumulate at distal sites (e.g., sites physically separated from the administration site). LNPs include “pSPLP,” which include an encapsulated condensing agent-nucleic acid complex as set forth in PCT Publication No. WO 00/03683. The particles of the present invention typically have a mean diameter of about 50 nm to about 150 nm, more typically about 60 nm to about 130 nm, more typically about 70 nm to about 110 nm, most typically about 70 nm to about 90 nm, and are substantially nontoxic. In addition, the nucleic acids when present in the nucleic acid-lipid particles of the present invention are resistant in aqueous solution to degradation with a nuclease. Nucleic acid-lipid particles and their method of preparation are disclosed in, e.g., U.S. Pat. Nos. 5,976,567; 5,981,501; 6,534,484; 6,586,410; 6,815,432; U.S. Publication No. 2010/0324120 and PCT Publication No. WO 96/40964.

[0522] In one embodiment, the lipid to drug ratio (mass/mass ratio) (e.g., lipid to dsRNA ratio) will be in the range of from about 1:1 to about 50:1, from about 1:1 to about 25:1, from about 3:1 to about 15:1, from about 4:1 to about 10:1, from about 5:1 to about 9:1, or about 6:1 to about 9:1. Ranges intermediate to the above recited ranges are also contemplated to be part of the invention.

[0523] The cationic lipid can be, for example, N,N-dioleyl-N,N-dimethylammonium chloride (DODAC), N,N-distearyl-N,N-dimethylammonium bromide (DDAB), N-(I-(2,3-dioleoyloxy)propyl)-N,N,N-trimethylammonium chloride (DOTAP), N-(I-(2,3-dioleyloxy)propyl)-N,N,N-trimethylammonium chloride (DOTMA), N,N-dimethyl-2,3-dioleyloxy)propylamine (DODMA), 1,2-DiLinoleyloxy-N,N-dimethylaminopropane (DLinDMA), 1,2-Dilinolenyloxy-N,N-dimethylaminopropane (DLenDMA), 1,2-Dilinoleylcarbamoyloxy-3-dimethylaminopropane (DLin-C-DAP), 1,2-Dilinoleyoxy-3-(dimethylamino)acetoxypropane (DLin-DAC), 1,2-Dilinoleyoxy-3-morpholinopropane (DLin-MA), 1,2-Dilinoleoyl-3-dimethylaminopropane (DLinDAP), 1,2-Dilinoleylthio-3-dimethylaminopropane (DLin-S-DMA), 1-Linoleoyl-2-linoleyloxy-3-dimethylaminopropane (DLin-2-DMAP), 1,2-Dilinoleyloxy-3-trimethylaminopropane chloride salt (DLin-TMA.Cl), 1,2-Dilinoleoyl-3-trimethylaminopropane chloride salt (DLin-TAP.Cl), 1,2-Dilinoleyloxy-3-(N-methylpiperazino)propane (DLin-MPZ), or 3-(N,N-Dilinoleylamino)-1,2-propanediol (DLinAP), 3-(N,N-Dioleylamino)-1,2-propanedio (DOAP), 1,2-Dilinoleyloxo-3-(2-N,N-dimethylamino)ethoxypropane (DLin-EG-DMA), 1,2-Dilinolenyloxy-N,N-dimethylaminopropane (DLinDMA), 2,2-Dilinoleyl-4-dimethylaminomethyl-[1,3]-dioxolane (DLin-K-DMA) or analogs thereof, (3aR,5s,6aS)-N,N-dimethyl-2,2-di((9Z,12Z)-octadeca-9,12-dienyl)tetrahydro-3aH-cyclopenta[d][1,3]dioxol-5-amine (ALN100), (6Z,9Z,28Z,31Z)-heptatriaconta-6,9,28,31-tetraen-19-yl 4-(dimethylamino)butanoate (MC3), 1,1′-(2-(4-(2-((2-(bis(2-hydroxydodecyl)amino)ethyl)(2-hydroxydodecyl)amino)ethyl)piperazin-1-yl)ethylazanediyl)didodecan-2-ol (Tech G1), or a mixture thereof. The cationic lipid can comprise from about 20 mol % to about 50 mol % or about 40 mol % of the total lipid present in the particle.

[0524] In another embodiment, the compound 2,2-Dilinoleyl-4-dimethylaminoethyl-[1,3]-dioxolane can be used to prepare lipid-siRNA nanoparticles. Synthesis of 2,2-Dilinoleyl-4-dimethylaminoethyl-[1,3]-dioxolane is described in U.S. provisional patent application No. 61/107,998 filed on Oct. 23, 2008, which is herein incorporated by reference.

[0525] In one embodiment, the lipid-siRNA particle includes 40% 2, 2-Dilinoleyl-4-dimethylaminoethyl-[1,3]-dioxolane: 10% DSPC: 40% Cholesterol: 10% PEG-C-DOMG (mole percent) with a particle size of 63.0±20 nm and a 0.027 siRNA/Lipid Ratio.

[0526] The ionizable/non-cationic lipid can be an anionic lipid or a neutral lipid including, but not limited to, distearoylphosphatidylcholine (DSPC), dioleoylphosphatidylcholine (DOPC), dipalmitoylphosphatidylcholine (DPPC), dioleoylphosphatidylglycerol (DOPG), dipalmitoylphosphatidylglycerol (DPPG), dioleoyl-phosphatidylethanolamine (DOPE), palmitoyloleoylphosphatidylcholine (POPC), palmitoyloleoylphosphatidylethanolamine (POPE), dioleoyl-phosphatidylethanolamine 4-(N-maleimidomethyl)-cyclohexane-1-carboxylate (DOPE-mal), dipalmitoyl phosphatidyl ethanolamine (DPPE), dimyristoylphosphoethanolamine (DMPE), distearoyl-phosphatidyl-ethanolamine (DSPE), 16-O-monomethyl PE, 16-O-dimethyl PE, 18-1-trans PE, 1-stearoyl-2-oleoyl-phosphatidyethanolamine (SOPE), cholesterol, or a mixture thereof. The non-cationic lipid can be from about 5 mol % to about 90 mol %, about 10 mol %, or about 58 mol % if cholesterol is included, of the total lipid present in the particle.

[0527] The conjugated lipid that inhibits aggregation of particles can be, for example, a polyethyleneglycol (PEG)-lipid including, without limitation, a PEG-diacylglycerol (DAG), a PEG-dialkyloxypropyl (DAA), a PEG-phospholipid, a PEG-ceramide (Cer), or a mixture thereof. The PEG-DAA conjugate can be, for example, a PEG-dilauryloxypropyl (Ci₂), a PEG-dimyristyloxypropyl (Ci₄), a PEG-dipalmityloxypropyl (Ci₆), or a PEG-distearyloxypropyl (C]₈). The conjugated lipid that prevents aggregation of particles can be from 0 mol % to about 20 mol % or about 2 mol % of the total lipid present in the particle.

[0528] In some embodiments, the nucleic acid-lipid particle further includes cholesterol at, e.g., about 10 mol % to about 60 mol % or about 48 mol % of the total lipid present in the particle.

[0529] In one embodiment, the lipidoid ND98⋅4HCl (MW 1487) (see U.S. patent application Ser. No. 12/056,230, filed Mar. 26, 2008, which is incorporated herein by reference), Cholesterol (Sigma-Aldrich), and PEG-Ceramide C16 (Avanti Polar Lipids) can be used to prepare lipid-dsRNA nanoparticles (i.e., LNP01 particles). Stock solutions of each in ethanol can be prepared as follows: ND98, 133 mg/ml; Cholesterol, 25 mg/ml, PEG-Ceramide C16, 100 mg/ml. The ND98, Cholesterol, and PEG-Ceramide C16 stock solutions can then be combined in a, e.g., 42:48:10 molar ratio. The combined lipid solution can be mixed with aqueous dsRNA (e.g., in sodium acetate pH 5) such that the final ethanol concentration is about 35-45% and the final sodium acetate concentration is about 100-300 mM. Lipid-dsRNA nanoparticles typically form spontaneously upon mixing. Depending on the desired particle size distribution, the resultant nanoparticle mixture can be extruded through a polycarbonate membrane (e.g., 100 nm cut-off) using, for example, a thermobarrel extruder, such as Lipex Extruder (Northern Lipids, Inc). In some cases, the extrusion step can be omitted. Ethanol removal and simultaneous buffer exchange can be accomplished by, for example, dialysis or tangential flow filtration. Buffer can be exchanged with, for example, phosphate buffered saline (PBS) at about pH 7, e.g., about pH 6.9, about pH 7.0, about pH 7.1, about pH 7.2, about pH 7.3, or about pH 7.4.

[chemical structure]

[0530] LNP01 formulations are described, e.g., in International Application Publication No. WO 2008/042973, which is hereby incorporated by reference.

[0531] Additional exemplary lipid-dsRNA formulations are described in Table 1.

TABLE 1

| | | cationic lipid/non-cationic |
|---|---|---|
| | | lipid/cholesterol/PEG-lipid conjugate |
| | Ionizable/Cationic Lipid | Lipid:siRNA ratio |
| SNALP-1 | 1,2-Dilinolenyloxy-N,N- | DLinDMA/DPPC/Cholesterol/PEG-cDMA |
| | dimethylaminopropane (DLinDMA) | (57.1/7.1/34.4/1.4) |
| | | lipid:siRNA~7:1 |
| 2-XTC | 2,2-Dilinoleyl-4-dimethylaminoethyl-[1,3]- | XTC/DPPC/Cholesterol/PEG-cDMA |
| | dioxolane (XTC) | 57.1/7.1/34.4/1.4 |
| | | lipid:siRNA~7:1 |
| LNP05 | 2,2-Dilinoleyl-4-dimethylaminoethyl-[1,3]- | XTC/DSPC/Cholesterol/PEG-DMG |
| | dioxolane (XTC) | 57.5/7.5/31.5/3.5 |
| | | lipid:siRNA~6:1 |
| LNP06 | 2,2-Dilinoleyl-4-dimethylaminoethyl-[1,3]- | XTC/DSPC/Cholesterol/PEG-DMG |
| | dioxolane (XTC) | 57.5/7.5/31.5/3.5 |
| | | lipid:siRNA~11:1 |
| LNP07 | 2,2-Dilinoleyl-4-dimethylaminoethyl-[1,3]- | XTC/DSPC/Cholesterol/PEG-DMG |
| | dioxolane (XTC) | 60/7.5/31/1.5, |
| | | lipid:siRNA~6:1 |
| LNP08 | 2,2-Dilinoleyl-4-dimethylaminoethyl-[1,3]- | XTC/DSPC/Cholesterol/PEG-DMG |
| | dioxolane (XTC) | 60/7.5/31/1.5, |
| | | lipid:siRNA~11:1 |
| LNP09 | 2,2-Dilinoleyl-4-dimethylaminoethyl-[1,3]- | XTC/DSPC/Cholesterol/PEG-DMG |
| | dioxolane (XTC) | 50/10/38.5/1.5 |
| | | Lipid:siRNA 10:1 |
| LNP10 | (3aR,5s,6aS)-N,N-dimethyl-2,2- | ALN100/DSPC/Cholesterol/PEG-DMG |
| | di((9Z,12Z)-octadeca-9,12- | 50/10/38.5/1.5 |
| | dienyl)tetrahydro-3aH- | Lipid:siRNA 10:1 |
| | cyclopenta[d][1,3]dioxol-5-amine | |
| | (ALN100) | |
| LNP11 | (6Z,9Z,28Z,31Z)-heptatriaconta-6,9,28,31- | MC-3/DSPC/Cholesterol/PEG-DMG |
| | tetraen-19-yl 4-(dimethylamino)butanoate | 50/10/38.5/1.5 |
| | (MC3) | Lipid:siRNA 10:1 |
| LNP12 | 1,1′-(2-(4-(2-((2-(bis(2- | Tech G1/DSPC/Cholesterol/PEG-DMG |
| | hydroxydodecyl)amino)ethyl)(2- | 50/10/38.5/1.5 |
| | hydroxydodecyl)amino)ethyl)piperazin-1- | Lipid:siRNA 10:1 |
| | yl)ethylazanediyl)didodecan-2-ol (Tech | |
| | G1) | |
| LNP13 | XTC | XTC/DSPC/Chol/PEG-DMG |
| | | 50/10/38.5/1.5 |
| | | Lipid:siRNA: 33:1 |
| LNP14 | MC3 | MC3/DSPC/Chol/PEG-DMG |
| | | 40/15/40/5 |
| | | Lipid:siRNA: 11:1 |
| LNP15 | MC3 | MC3/DSPC/Chol/PEG-DSG/GalNAc-PEG- |
| | | DSG |
| | | 50/10/35/4.5/0.5 |
| | | Lipid:siRNA: 11:1 |
| LNP16 | MC3 | MC3/DSPC/Chol/PEG-DMG |
| | | 50/10/38.5/1.5 |
| | | Lipid:siRNA: 7:1 |
| LNP17 | MC3 | MC3/DSPC/Chol/PEG-DSG |
| | | 50/10/38.5/1.5 |
| | | Lipid:siRNA: 10:1 |
| LNP18 | MC3 | MC3/DSPC/Chol/PEG-DMG |
| | | 50/10/38.5/1.5 |
| | | Lipid:siRNA: 12:1 |
| LNP19 | MC3 | MC3/DSPC/Chol/PEG-DMG |
| | | 50/10/35/5 |
| | | Lipid:siRNA: 8:1 |
| LNP20 | MC3 | MC3/DSPC/Chol/PEG-DPG |
| | | 50/10/38.5/1.5 |
| | | Lipid:siRNA: 10:1 |
| LNP21 | C12-200 | Cl 2-200/D SPC/Chol/PEG-D SG |
| | | 50/10/38.5/1.5 |
| | | Lipid:siRNA: 7:1 |
| LNP22 | XTC | XTC/DSPC/Chol/PEG-DSG |
| | | 50/10/38.5/1.5 |
| | | Lipid:siRNA: 10:1 |

DSPC: distearoylphosphatidylcholine
DPPC: dipalmitoylphosphatidylcholine
PEG-DMG: PEG-didimyristoyl glycerol (C14-PEG, or PEG-C14) (PEG with avg mol wt of 2000)
PEG-DSG: PEG-distyryl glycerol (C18-PEG, or PEG-C18) (PEG with avg mol wt of 2000)
PEG-cDMA: PEG-carbamoyl-1,2-dimyristyloxypropylamine (PEG with avg mol wt of 2000)
SNALP (1,2-Dilinolenyloxy-N,N-dimethylaminopropane (DLinDMA)) comprising formulations are described in International Publication No. WO2009/127060, filed April 15, 2009, which is hereby incorporated by reference.

[0532] XTC comprising formulations are described, e.g., in U.S. Provisional Ser. No. 61/148,366, filed Jan. 29, 2009; U.S. Provisional Ser. No. 61/156,851, filed Mar. 2, 2009; U.S. Provisional Serial No. filed Jun. 10, 2009; U.S. Provisional Ser. No. 61/228,373, filed Jul. 24, 2009; U.S. Provisional Ser. No. 61/239,686, filed Sep. 3, 2009, and International Application No. PCT/US2010/022614, filed Jan. 29, 2010, which are hereby incorporated by reference.

[0533] MC3 comprising formulations are described, e.g., in U.S. Publication No. 2010/0324120, filed Jun. 10, 2010, the entire contents of which are hereby incorporated by reference.

[0534] ALNY-100 comprising formulations are described, e.g., International patent application number PCT/US09/63933, filed on Nov. 10, 2009, which is hereby incorporated by reference.

[0535] C12-200 comprising formulations are described in U.S. Provisional Ser. No. 61/175,770, filed May 5, 2009 and International Application No. PCT/US10/33777, filed May 5, 2010, which are hereby incorporated by reference.

### Synthesis of Ionizable Cationic Lipids

[0536] Any of the compounds, e.g., cationic lipids and the like, used in the nucleic acid-lipid particles of the invention can be prepared by known organic synthesis techniques, including the methods described in more detail in the Examples. All substituents are as defined below unless indicated otherwise.

[0537] “Alkyl” means a straight chain or branched, noncyclic or cyclic, saturated aliphatic hydrocarbon containing from 1 to 24 carbon atoms. Representative saturated straight chain alkyls include methyl, ethyl, n-propyl, n-butyl, n-pentyl, n-hexyl, and the like; while saturated branched alkyls include isopropyl, sec-butyl, isobutyl, tert-butyl, isopentyl, and the like. Representative saturated cyclic alkyls include cyclopropyl, cyclobutyl, cyclopentyl, cyclohexyl, and the like; while unsaturated cyclic alkyls include cyclopentenyl and cyclohexenyl, and the like.

[0538] “Alkenyl” means an alkyl, as defined above, containing at least one double bond between adjacent carbon atoms. Alkenyls include both cis and trans isomers. Representative straight chain and branched alkenyls include ethylenyl, propylenyl, 1-butenyl, 2-butenyl, isobutylenyl, 1-pentenyl, 2-pentenyl, 3-methyl-1-butenyl, 2-methyl-2-butenyl, 2,3-dimethyl-2-butenyl, and the like.

[0539] “Alkynyl” means any alkyl or alkenyl, as defined above, which additionally contains at least one triple bond between adjacent carbons. Representative straight chain and branched alkynyls include acetylenyl, propynyl, 1-butynyl, 2-butynyl, 1-pentynyl, 2-pentynyl, 3-methyl-1 butynyl, and the like.

[0540] “Acyl” means any alkyl, alkenyl, or alkynyl wherein the carbon at the point of attachment is substituted with an oxo group, as defined below. For example, —C(═O)alkyl, —C(═O)alkenyl, and —C(═O)alkynyl are acyl groups.

[0541] “Heterocycle” means a 5- to 7-membered monocyclic, or 7- to 10-membered bicyclic, heterocyclic ring which is either saturated, unsaturated, or aromatic, and which contains from 1 or 2 heteroatoms independently selected from nitrogen, oxygen and sulfur, and wherein the nitrogen and sulfur heteroatoms can be optionally oxidized, and the nitrogen heteroatom can be optionally quaternized, including bicyclic rings in which any of the above heterocycles are fused to a benzene ring. The heterocycle can be attached via any heteroatom or carbon atom. Heterocycles include heteroaryls as defined below. Heterocycles include morpholinyl, pyrrolidinonyl, pyrrolidinyl, piperidinyl, piperizynyl, hydantoinyl, valerolactamyl, oxiranyl, oxetanyl, tetrahydrofuranyl, tetrahydropyranyl, tetrahydropyridinyl, tetrahydroprimidinyl, tetrahydrothiophenyl, tetrahydrothiopyranyl, tetrahydropyrimidinyl, tetrahydrothiophenyl, tetrahydrothiopyranyl, and the like.

[0542] The terms “optionally substituted alkyl”, “optionally substituted alkenyl”, “optionally substituted alkynyl”, “optionally substituted acyl”, and “optionally substituted heterocycle” means that, when substituted, at least one hydrogen atom is replaced with a substituent. In the case of an oxo substituent (═O) two hydrogen atoms are replaced. In this regard, substituents include oxo, halogen, heterocycle, —CN, —ORx, —NRxRy, —NRxC(═O)Ry, —NRxSO2Ry, —C(═O)Rx, —C(═O)ORx, —C(═O)NRxRy, —SOnRx and —SOnNRxRy, wherein n is 0, 1 or 2, Rx and Ry are the same or different and independently hydrogen, alkyl or heterocycle, and each of said alkyl and heterocycle substituents can be further substituted with one or more of oxo, halogen, —OH, —CN, alkyl, —ORx, heterocycle, —NRxRy, —NRxC(═O)Ry, —NRxSO2Ry, —C(═O)Rx, —C(═O)ORx, —C(═O)NRxRy, —SOnRx and —SOnNRxRy.

[0543] “Halogen” means fluoro, chloro, bromo and iodo.

[0544] In some embodiments, the methods of the invention can require the use of protecting groups. Protecting group methodology is well known to those skilled in the art (see, for example, Protective Groups in Organic Synthesis, Green, T. W. et al., Wiley-Interscience, New York City, 1999). Briefly, protecting groups within the context of this invention are any group that reduces or eliminates unwanted reactivity of a functional group. A protecting group can be added to a functional group to mask its reactivity during certain reactions and then removed to reveal the original functional group. In some embodiments an “alcohol protecting group” is used. An “alcohol protecting group” is any group which decreases or eliminates unwanted reactivity of an alcohol functional group. Protecting groups can be added and removed using techniques well known in the art.

### Synthesis of Formula A

[0545] In some embodiments, nucleic acid-lipid particles of the invention are formulated using a cationic lipid of formula A:

[chemical structure]

where R1 and R2 are independently alkyl, alkenyl or alkynyl, each can be optionally substituted, and R3 and R4 are independently lower alkyl or R3 and R4 can be taken together to form an optionally substituted heterocyclic ring. In some embodiments, the cationic lipid is XTC (2,2-Dilinoleyl-4-dimethylaminoethyl-[1,3]-dioxolane). In general, the lipid of formula A above can be made by the following Reaction Schemes 1 or 2, wherein all substituents are as defined above unless indicated otherwise.

[chemical structure]

Lipid A, where R1 and R2 are independently alkyl, alkenyl or alkynyl, each can be optionally substituted, and R3 and R4 are independently lower alkyl or R3 and R4 can be taken together to form an optionally substituted heterocyclic ring, can be prepared according to Scheme 1. Ketone 1 and bromide 2 can be purchased or prepared according to methods known to those of ordinary skill in the art. Reaction of 1 and 2 yields ketal 3. Treatment of ketal 3 with amine 4 yields lipids of formula A. The lipids of formula A can be converted to the corresponding ammonium salt with an organic salt of formula 5, where X is anion counter ion selected from halogen, hydroxide, phosphate, sulfate, or the like.

[chemical structure]

[0546] Alternatively, the ketone 1 starting material can be prepared according to Scheme 2. Grignard reagent 6 and cyanide 7 can be purchased or prepared according to methods known to those of ordinary skill in the art. Reaction of 6 and 7 yields ketone 1. Conversion of ketone 1 to the corresponding lipids of formula A is as described in Scheme 1.

### Synthesis of MC3

[0547] Preparation of DLin-M-C3-DMA (i.e., (6Z,9Z,28Z,31Z)-heptatriaconta-6,9,28,31-tetraen-19-yl 4-(dimethylamino)butanoate) was as follows. A solution of (6Z,9Z,28Z,31Z)-heptatriaconta-6,9,28,31-tetraen-19-ol (0.53 g), 4-N,N-dimethylaminobutyric acid hydrochloride (0.51 g), 4-N,N-dimethylaminopyridine (0.61 g) and 1-ethyl-3-(3-dimethylaminopropyl)carbodiimide hydrochloride (0.53 g) in dichloromethane (5 mL) was stirred at room temperature overnight. The solution was washed with dilute hydrochloric acid followed by dilute aqueous sodium bicarbonate. The organic fractions were dried over anhydrous magnesium sulphate, filtered and the solvent removed on a rotovap. The residue was passed down a silica gel column (20 g) using a 1-5% methanol/dichloromethane elution gradient. Fractions containing the purified product were combined and the solvent removed, yielding a colorless oil (0.54 g).

### Synthesis of ALNY-100

[0548] Synthesis of ketal 519 ALNY-1001 was performed using the following scheme 3:

[chemical structure]

### Synthesis of 515

[0549] To a stirred suspension of LiAlH4 (3.74 g, 0.09852 mol) in 200 ml anhydrous THF in a two neck RBF (1 L), was added a solution of 514 (10 g, 0.04926 mol) in 70 mL of THF slowly at 0° C. under nitrogen atmosphere. After complete addition, reaction mixture was warmed to room temperature and then heated to reflux for 4 h. Progress of the reaction was monitored by TLC. After completion of reaction (by TLC) the mixture was cooled to 0° C. and quenched with careful addition of saturated Na2SO4 solution. Reaction mixture was stirred for 4 h at room temperature and filtered off. Residue was washed well with THF. The filtrate and washings were mixed and diluted with 400 mL dioxane and 26 mL conc. HCl and stirred for 20 minutes at room temperature. The volatilities were stripped off under vacuum to furnish the hydrochloride salt of 515 as a white solid. Yield: 7.12 g 1H-NMR (DMSO, 400 MHz): δ=9.34 (broad, 2H), 5.68 (s, 2H), 3.74 (m, 1H), 2.66-2.60 (m, 2H), 2.50-2.45 (m, 5H).

### Synthesis of 516

[0550] To a stirred solution of compound 515 in 100 mL dry DCM in a 250 mL two neck RBF, was added NEt3 (37.2 mL, 0.2669 mol) and cooled to 0° C. under nitrogen atmosphere. After a slow addition of N-(benzyloxy-carbonyloxy)-succinimide (20 g, 0.08007 mol) in 50 mL dry DCM, reaction mixture was allowed to warm to room temperature. After completion of the reaction (2-3 h by TLC) mixture was washed successively with 1N HCl solution (1×100 mL) and saturated NaHCO₃ solution (1×50 mL). The organic layer was then dried over anhyd. Nₐ2SO4 and the solvent was evaporated to give crude material which was purified by silica gel column chromatography to get 516 as sticky mass. Yield: 11 g (89%). 1H-NMR (CDCl3, 400 MHz): δ=7.36-7.27 (m, 5H), 5.69 (s, 2H), 5.12 (s, 2H), 4.96 (br., 1H) 2.74 (s, 3H), 2.60 (m, 2H), 2.30-2.25 (m, 2H). LC-MS [M+H]-232.3 (96.94%).

### Synthesis of 517A and 517B

[0551] The cyclopentene 516 (5 g, 0.02164 mol) was dissolved in a solution of 220 mL acetone and water (10:1) in a single neck 500 mL RBF and to it was added N-methyl morpholine-N-oxide (7.6 g, 0.06492 mol) followed by 4.2 mL of 7.6% solution of0.0 (0.275 g, 0.00108 mol) in tert-butanol at room temperature. After completion of the reaction (˜3 h), the mixture was quenched with addition of solid Na2SO3 and resulting mixture was stirred for 1.5 h at room temperature. Reaction mixture was diluted with DCM (300 mL) and washed with water (2×100 mL) followed by saturated NaHCO₃ (1×50 mL) solution, water (1×30 mL) and finally with brine (1×50 mL). Organic phase was dried over an.Na2SO4 and solvent was removed in vacuum. Silica gel column chromatographic purification of the crude material was afforded a mixture of diastereomers, which were separated by prep HPLC. Yield: −6 g crude

[0552] 517A—Peak-1 (white solid), 5.13 g (96%). 1H-NMR (DMSO, 400 MHz): δ=7.39-7.31 (m, 5H), 5.04 (s, 2H), 4.78-4.73 (m, 1H), 4.48-4.47 (d, 2H), 3.94-3.93 (m, 2H), 2.71 (s, 3H), 1.72-1.67 (m, 4H). LC-MS—[M+H]-266.3, [M+NH4+]-283.5 present, HPLC-97.86%. Stereochemistry confirmed by X-ray.

### Synthesis of 518

[0553] Using a procedure analogous to that described for the synthesis of compound 505, compound 518 (1.2 g, 41%) was obtained as a colorless oil. 1H-NMR (CDCl3, 400 MHz): δ=7.35-7.33 (m, 4H), 7.30-7.27 (m, 1H), 5.37-5.27 (m, 8H), 5.12 (s, 2H), 4.75 (m, 1H), 4.58-4.57 (m, 2H), 2.78-2.74 (m, 7H), 2.06-2.00 (m, 8H), 1.96-1.91 (m, 2H), 1.62 (m, 4H), 1.48 (m, 2H), 1.37-1.25 (br m, 36H), 0.87 (m, 6H). HPLC-98.65%.

### General Procedure for the Synthesis of Compound 519

[0554] A solution of compound 518 (1 eq) in hexane (15 mL) was added in a drop-wise fashion to an ice-cold solution of LAH in THF (1 M, 2 eq). After complete addition, the mixture was heated at 40° C. over 0.5 h then cooled again on an ice bath. The mixture was carefully hydrolyzed with saturated aqueous Na2SO4 then filtered through celite and reduced to an oil. Column chromatography provided the pure 519 (1.3 g, 68%) which was obtained as a colorless oil. 13C NMR 6=130.2, 130.1 (×2), 127.9 (×3), 112.3, 79.3, 64.4, 44.7, 38.3, 35.4, 31.5, 29.9 (×2), 29.7, 29.6 (×2), 29.5 (×3), 29.3 (×2), 27.2 (×3), 25.6, 24.5, 23.3, 226, 14.1; Electrospray MS (+ve): Molecular weight for C44H80NO2 (M+H)+ Calc. 654.6, Found 654.6.

[0555] Formulations prepared by either the standard or extrusion-free method can be characterized in similar manners. For example, formulations are typically characterized by visual inspection. They should be whitish translucent solutions free from aggregates or sediment. Particle size and particle size distribution of lipid-nanoparticles can be measured by light scattering using, for example, a Malvern Zetasizer Nano ZS (Malvern, USA). Particles should be about 20-300 nm, such as 40-100 nm in size. The particle size distribution should be unimodal. The total dsRNA concentration in the formulation, as well as the entrapped fraction, is estimated using a dye exclusion assay. A sample of the formulated dsRNA can be incubated with an RNA-binding dye, such as Ribogreen (Molecular Probes) in the presence or absence of a formulation disrupting surfactant, e.g., 0.5% Triton-X100. The total dsRNA in the formulation can be determined by the signal from the sample containing the surfactant, relative to a standard curve. The entrapped fraction is determined by subtracting the “free” dsRNA content (as measured by the signal in the absence of surfactant) from the total dsRNA content. Percent entrapped dsRNA is typically >85%. For SNALP formulation, the particle size is at least 30 nm, at least 40 nm, at least 50 nm, at least 60 nm, at least 70 nm, at least 80 nm, at least 90 nm, at least 100 nm, at least 110 nm, and at least 120 nm. The suitable range is typically about at least 50 nm to about at least 110 nm, about at least 60 nm to about at least 100 nm, or about at least 80 nm to about at least 90 nm.

[0556] Compositions and formulations for oral administration include powders or granules, microparticulates, nanoparticulates, suspensions or solutions in water or non-aqueous media, capsules, gel capsules, sachets, tablets or minitablets. Thickeners, flavoring agents, diluents, emulsifiers, dispersing aids or binders can be desirable. In some embodiments, oral formulations are those in which dsRNAs featured in the invention are administered in conjunction with one or more penetration enhancer surfactants and chelators. Suitable surfactants include fatty acids and/or esters or salts thereof, bile acids and/or salts thereof. Suitable bile acids/salts include chenodeoxycholic acid (CDCA) and ursodeoxychenodeoxycholic acid (UDCA), cholic acid, dehydrocholic acid, deoxycholic acid, glucholic acid, glycholic acid, glycodeoxycholic acid, taurocholic acid, taurodeoxycholic acid, sodium tauro-24,25-dihydro-fusidate and sodium glycodihydrofusidate. Suitable fatty acids include arachidonic acid, undecanoic acid, oleic acid, lauric acid, caprylic acid, capric acid, myristic acid, palmitic acid, stearic acid, linoleic acid, linolenic acid, dicaprate, tricaprate, monoolein, dilaurin, glyceryl 1-monocaprate, 1-dodecylazacycloheptan-2-one, an acylcarnitine, an acylcholine, or a monoglyceride, a diglyceride or a pharmaceutically acceptable salt thereof (e.g., sodium). In some embodiments, combinations of penetration enhancers are used, for example, fatty acids/salts in combination with bile acids/salts. One exemplary combination is the sodium salt of lauric acid, capric acid and UDCA. Further penetration enhancers include polyoxyethylene-9-lauryl ether, polyoxyethylene-20-cetyl ether. DsRNAs featured in the invention can be delivered orally, in granular form including sprayed dried particles, or complexed to form micro or nanoparticles. DsRNA complexing agents include poly-amino acids; polyimines; polyacrylates; polyalkylacrylates, polyoxethanes, polyalkylcyanoacrylates; cationized gelatins, albumins, starches, acrylates, polyethyleneglycols (PEG) and starches; polyalkylcyanoacrylates; DEAE-derivatized polyimines, pollulans, celluloses and starches. Suitable complexing agents include chitosan, N-trimethylchitosan, poly-L-lysine, polyhistidine, polyornithine, polyspermines, protamine, polyvinylpyridine, polythiodiethylaminomethylethylene P(TDAE), polyaminostyrene (e.g., p-amino), poly(methylcyanoacrylate), poly(ethylcyanoacrylate), poly(butylcyanoacrylate), poly(isobutylcyanoacrylate), poly(isohexylcynaoacrylate), DEAE-methacrylate, DEAE-hexylacrylate, DEAE-acrylamide, DEAE-albumin and DEAE-dextran, polymethylacrylate, polyhexylacrylate, poly(D,L-lactic acid), poly(DL-lactic-co-glycolic acid (PLGA), alginate, and polyethyleneglycol (PEG). Oral formulations for dsRNAs and their preparation are described in detail in U.S. Pat. No. 6,887,906, US Publn. No. 20030027780, and U.S. Pat. No. 6,747,014, each of which is incorporated herein by reference.

[0557] Compositions and formulations for parenteral, intraparenchymal (into the brain), intrathecal, intraventricular or intrahepatic administration can include sterile aqueous solutions which can also contain buffers, diluents and other suitable additives such as, but not limited to, penetration enhancers, carrier compounds and other pharmaceutically acceptable carriers or excipients.

[0558] Pharmaceutical compositions of the present invention include, but are not limited to, solutions, emulsions, and liposome-containing formulations. These compositions can be generated from a variety of components that include, but are not limited to, preformed liquids, self-emulsifying solids and self-emulsifying semisolids. Particularly preferred are formulations that target the liver when treating hepatic disorders such as hepatic carcinoma.

[0559] The pharmaceutical formulations of the present invention, which can conveniently be presented in unit dosage form, can be prepared according to conventional techniques well known in the pharmaceutical industry. Such techniques include the step of bringing into association the active ingredients with the pharmaceutical carrier(s) or excipient(s). In general, the formulations are prepared by uniformly and intimately bringing into association the active ingredients with liquid carriers or finely divided solid carriers or both, and then, if necessary, shaping the product.

[0560] The compositions of the present invention can be formulated into any of many possible dosage forms such as, but not limited to, tablets, capsules, gel capsules, liquid syrups, soft gels, suppositories, and enemas. The compositions of the present invention can also be formulated as suspensions in aqueous, non-aqueous or mixed media. Aqueous suspensions can further contain substances which increase the viscosity of the suspension including, for example, sodium carboxymethylcellulose, sorbitol and/or dextran. The suspension can also contain stabilizers.

[0561] C. Additional Formulations

[0562] i. Emulsions

[0563] The compositions of the present invention can be prepared and formulated as emulsions. Emulsions are typically heterogeneous systems of one liquid dispersed in another in the form of droplets usually exceeding 0.1 μm in diameter (see e.g., Ansel's Pharmaceutical Dosage Forms and Drug Delivery Systems, Allen, L V., Popovich N G., and Ansel H C., 2004, Lippincott Williams & Wilkins (8th ed.), New York, N.Y.; Idson, in Pharmaceutical Dosage Forms, Lieberman, Rieger and Banker (Eds.), 1988, Marcel Dekker, Inc., New York, N.Y., volume 1, p. 199; Rosoff, in Pharmaceutical Dosage Forms, Lieberman, Rieger and Banker (Eds.), 1988, Marcel Dekker, Inc., New York, N.Y., Volume 1, p. 245; Block in Pharmaceutical Dosage Forms, Lieberman, Rieger and Banker (Eds.), 1988, Marcel Dekker, Inc., New York, N.Y., volume 2, p. 335; Higuchi et al., in Remington's Pharmaceutical Sciences, Mack Publishing Co., Easton, Pa., 1985, p. 301). Emulsions are often biphasic systems comprising two immiscible liquid phases intimately mixed and dispersed with each other. In general, emulsions can be of either the water-in-oil (w/o) or the oil-in-water (o/w) variety. When an aqueous phase is finely divided into and dispersed as minute droplets into a bulk oily phase, the resulting composition is called a water-in-oil (w/o) emulsion. Alternatively, when an oily phase is finely divided into and dispersed as minute droplets into a bulk aqueous phase, the resulting composition is called an oil-in-water (o/w) emulsion. Emulsions can contain additional components in addition to the dispersed phases, and the active drug which can be present as a solution in either the aqueous phase, oily phase or itself as a separate phase. Pharmaceutical excipients such as emulsifiers, stabilizers, dyes, and antioxidants can also be present in emulsions as needed. Pharmaceutical emulsions can also be multiple emulsions that are comprised of more than two phases such as, for example, in the case of oil-in-water-in-oil (o/w/o) and water-in-oil-in-water (w/o/w) emulsions. Such complex formulations often provide certain advantages that simple binary emulsions do not. Multiple emulsions in which individual oil droplets of an o/w emulsion enclose small water droplets constitute a w/o/w emulsion. Likewise a system of oil droplets enclosed in globules of water stabilized in an oily continuous phase provides an o/w/o emulsion.

[0564] Emulsions are characterized by little or no thermodynamic stability. Often, the dispersed or discontinuous phase of the emulsion is well dispersed into the external or continuous phase and maintained in this form through the means of emulsifiers or the viscosity of the formulation. Either of the phases of the emulsion can be a semisolid or a solid, as is the case of emulsion-style ointment bases and creams. Other means of stabilizing emulsions entail the use of emulsifiers that can be incorporated into either phase of the emulsion. Emulsifiers can broadly be classified into four categories: synthetic surfactants, naturally occurring emulsifiers, absorption bases, and finely dispersed solids (see e.g., Ansel's Pharmaceutical Dosage Forms and Drug Delivery Systems, Allen, L V., Popovich N G., and Ansel H C., 2004, Lippincott Williams & Wilkins (8th ed.), New York, N.Y.; Idson, in Pharmaceutical Dosage Forms, Lieberman, Rieger and Banker (Eds.), 1988, Marcel Dekker, Inc., New York, N.Y., volume 1, p. 199).

[0565] Synthetic surfactants, also known as surface active agents, have found wide applicability in the formulation of emulsions and have been reviewed in the literature (see e.g., Ansel's Pharmaceutical Dosage Forms and Drug Delivery Systems, Allen, L V., Popovich N G., and Ansel H C., 2004, Lippincott Williams & Wilkins (8th ed.), New York, N.Y.; Rieger, in Pharmaceutical Dosage Forms, Lieberman, Rieger and Banker (Eds.), 1988, Marcel Dekker, Inc., New York, N.Y., volume 1, p. 285; Idson, in Pharmaceutical Dosage Forms, Lieberman, Rieger and Banker (Eds.), Marcel Dekker, Inc., New York, N.Y., 1988, volume 1, p. 199). Surfactants are typically amphiphilic and comprise a hydrophilic and a hydrophobic portion. The ratio of the hydrophilic to the hydrophobic nature of the surfactant has been termed the hydrophile/lipophile balance (HLB) and is a valuable tool in categorizing and selecting surfactants in the preparation of formulations. Surfactants can be classified into different classes based on the nature of the hydrophilic group: nonionic, anionic, cationic and amphoteric (see e.g., Ansel's Pharmaceutical Dosage Forms and Drug Delivery Systems, Allen, L V., Popovich N G., and Ansel H C., 2004, Lippincott Williams & Wilkins (8th ed.), New York, N.Y. Rieger, in Pharmaceutical Dosage Forms, Lieberman, Rieger and Banker (Eds.), 1988, Marcel Dekker, Inc., New York, N.Y., volume 1, p. 285).

[0566] Naturally occurring emulsifiers used in emulsion formulations include lanolin, beeswax, phosphatides, lecithin and acacia. Absorption bases possess hydrophilic properties such that they can soak up water to form w/o emulsions yet retain their semisolid consistencies, such as anhydrous lanolin and hydrophilic petrolatum. Finely divided solids have also been used as good emulsifiers especially in combination with surfactants and in viscous preparations. These include polar inorganic solids, such as heavy metal hydroxides, nonswelling clays such as bentonite, attapulgite, hectorite, kaolin, montmorillonite, colloidal aluminum silicate and colloidal magnesium aluminum silicate, pigments and nonpolar solids such as carbon or glyceryl tristearate.

[0567] A large variety of non-emulsifying materials are also included in emulsion formulations and contribute to the properties of emulsions. These include fats, oils, waxes, fatty acids, fatty alcohols, fatty esters, humectants, hydrophilic colloids, preservatives and antioxidants (Block, in Pharmaceutical Dosage Forms, Lieberman, Rieger and Banker (Eds.), 1988, Marcel Dekker, Inc., New York, N.Y., volume 1, p. 335; Idson, in Pharmaceutical Dosage Forms, Lieberman, Rieger and Banker (Eds.), 1988, Marcel Dekker, Inc., New York, N.Y., volume 1, p. 199).

[0568] Hydrophilic colloids or hydrocolloids include naturally occurring gums and synthetic polymers such as polysaccharides (for example, acacia, agar, alginic acid, carrageenan, guar gum, karaya gum, and tragacanth), cellulose derivatives (for example, carboxymethylcellulose and carboxypropylcellulose), and synthetic polymers (for example, carbomers, cellulose ethers, and carboxyvinyl polymers). These disperse or swell in water to form colloidal solutions that stabilize emulsions by forming strong interfacial films around the dispersed-phase droplets and by increasing the viscosity of the external phase.

[0569] Since emulsions often contain a number of ingredients such as carbohydrates, proteins, sterols and phosphatides that can readily support the growth of microbes, these formulations often incorporate preservatives. Commonly used preservatives included in emulsion formulations include methyl paraben, propyl paraben, quaternary ammonium salts, benzalkonium chloride, esters of p-hydroxybenzoic acid, and boric acid. Antioxidants are also commonly added to emulsion formulations to prevent deterioration of the formulation. Antioxidants used can be free radical scavengers such as tocopherols, alkyl gallates, butylated hydroxyanisole, butylated hydroxytoluene, or reducing agents such as ascorbic acid and sodium metabisulfite, and antioxidant synergists such as citric acid, tartaric acid, and lecithin.

[0570] The application of emulsion formulations via dermatological, oral and parenteral routes and methods for their manufacture have been reviewed in the literature (see e.g., Ansel's Pharmaceutical Dosage Forms and Drug Delivery Systems, Allen, L V., Popovich N G., and Ansel H C., 2004, Lippincott Williams & Wilkins (8th ed.), New York, N.Y.; Idson, in Pharmaceutical Dosage Forms, Lieberman, Rieger and Banker (Eds.), 1988, Marcel Dekker, Inc., New York, N.Y., volume 1, p. 199). Emulsion formulations for oral delivery have been very widely used because of ease of formulation, as well as efficacy from an absorption and bioavailability standpoint (see e.g., Ansel's Pharmaceutical Dosage Forms and Drug Delivery Systems, Allen, L V., Popovich N G., and Ansel H C., 2004, Lippincott Williams & Wilkins (8th ed.), New York, N.Y.; Rosoff, in Pharmaceutical Dosage Forms, Lieberman, Rieger and Banker (Eds.), 1988, Marcel Dekker, Inc., New York, N.Y., volume 1, p. 245; Idson, in Pharmaceutical Dosage Forms, Lieberman, Rieger and Banker (Eds.), 1988, Marcel Dekker, Inc., New York, N.Y., volume 1, p. 199). Mineral-oil base laxatives, oil-soluble vitamins and high fat nutritive preparations are among the materials that have commonly been administered orally as o/w emulsions.

[0571] ii. Microemulsions

[0572] In one embodiment of the present invention, the compositions of iRNAs and nucleic acids are formulated as microemulsions. A microemulsion can be defined as a system of water, oil and amphiphile which is a single optically isotropic and thermodynamically stable liquid solution (see e.g., Ansel's Pharmaceutical Dosage Forms and Drug Delivery Systems, Allen, L V., Popovich N G., and Ansel H C., 2004, Lippincott Williams & Wilkins (8th ed.), New York, N.Y.; Rosoff, in Pharmaceutical Dosage Forms, Lieberman, Rieger and Banker (Eds.), 1988, Marcel Dekker, Inc., New York, N.Y., volume 1, p. 245). Typically microemulsions are systems that are prepared by first dispersing an oil in an aqueous surfactant solution and then adding a sufficient amount of a fourth component, generally an intermediate chain-length alcohol to form a transparent system. Therefore, microemulsions have also been described as thermodynamically stable, isotropically clear dispersions of two immiscible liquids that are stabilized by interfacial films of surface-active molecules (Leung and Shah, in: Controlled Release of Drugs: Polymers and Aggregate Systems, Rosoff, M., Ed., 1989, VCH Publishers, New York, pages 185-215). Microemulsions commonly are prepared via a combination of three to five components that include oil, water, surfactant, cosurfactant and electrolyte. Whether the microemulsion is of the water-in-oil (w/o) or an oil-in-water (o/w) type is dependent on the properties of the oil and surfactant used and on the structure and geometric packing of the polar heads and hydrocarbon tails of the surfactant molecules (Schott, in Remington's Pharmaceutical Sciences, Mack Publishing Co., Easton, Pa., 1985, p. 271).

[0573] The phenomenological approach utilizing phase diagrams has been extensively studied and has yielded a comprehensive knowledge, to one skilled in the art, of how to formulate microemulsions (see e.g., Ansel's Pharmaceutical Dosage Forms and Drug Delivery Systems, Allen, L V., Popovich N G., and Ansel H C., 2004, Lippincott Williams & Wilkins (8th ed.), New York, N.Y.; Rosoff, in Pharmaceutical Dosage Forms, Lieberman, Rieger and Banker (Eds.), 1988, Marcel Dekker, Inc., New York, N.Y., volume 1, p. 245; Block, in Pharmaceutical Dosage Forms, Lieberman, Rieger and Banker (Eds.), 1988, Marcel Dekker, Inc., New York, N.Y., volume 1, p. 335). Compared to conventional emulsions, microemulsions offer the advantage of solubilizing water-insoluble drugs in a formulation of thermodynamically stable droplets that are formed spontaneously.

[0574] Surfactants used in the preparation of microemulsions include, but are not limited to, ionic surfactants, non-ionic surfactants, Brij 96, polyoxyethylene oleyl ethers, polyglycerol fatty acid esters, tetraglycerol monolaurate (ML310), tetraglycerol monooleate (M0310), hexaglycerol monooleate (P0310), hexaglycerol pentaoleate (P0500), decaglycerol monocaprate (MCA750), decaglycerol monooleate (M0750), decaglycerol sequioleate (S0750), decaglycerol decaoleate (DAO750), alone or in combination with cosurfactants. The cosurfactant, usually a short-chain alcohol such as ethanol, 1-propanol, and 1-butanol, serves to increase the interfacial fluidity by penetrating into the surfactant film and consequently creating a disordered film because of the void space generated among surfactant molecules. Microemulsions can, however, be prepared without the use of cosurfactants and alcohol-free self-emulsifying microemulsion systems are known in the art. The aqueous phase can typically be, but is not limited to, water, an aqueous solution of the drug, glycerol, PEG300, PEG400, polyglycerols, propylene glycols, and derivatives of ethylene glycol. The oil phase can include, but is not limited to, materials such as Captex 300, Captex 355, Capmul MCM, fatty acid esters, medium chain (C8-C12) mono, di, and tri-glycerides, polyoxyethylated glyceryl fatty acid esters, fatty alcohols, polyglycolized glycerides, saturated polyglycolized C8-C10 glycerides, vegetable oils and silicone oil.

[0575] Microemulsions are particularly of interest from the standpoint of drug solubilization and the enhanced absorption of drugs. Lipid based microemulsions (both o/w and w/o) have been proposed to enhance the oral bioavailability of drugs, including peptides (see e.g., U.S. Pat. Nos. 6,191,105; 7,063,860; 7,070,802; 7,157,099; Constantinides et al., Pharmaceutical Research, 1994, 11, 1385-1390; Ritschel, Meth. Find. Exp. Clin. Pharmacol., 1993, 13, 205). Microemulsions afford advantages of improved drug solubilization, protection of drug from enzymatic hydrolysis, possible enhancement of drug absorption due to surfactant-induced alterations in membrane fluidity and permeability, ease of preparation, ease of oral administration over solid dosage forms, improved clinical potency, and decreased toxicity (see e.g., U.S. Pat. Nos. 6,191,105; 7,063,860; 7,070,802; 7,157,099; Constantinides et al., Pharmaceutical Research, 1994, 11, 1385; Ho et al., J. Pharm. Sci., 1996, 85, 138-143). Often microemulsions can form spontaneously when their components are brought together at ambient temperature. This can be particularly advantageous when formulating thermolabile drugs, peptides or iRNAs. Microemulsions have also been effective in the transdermal delivery of active components in both cosmetic and pharmaceutical applications. It is expected that the microemulsion compositions and formulations of the present invention will facilitate the increased systemic absorption of iRNAs and nucleic acids from the gastrointestinal tract, as well as improve the local cellular uptake of iRNAs and nucleic acids.

[0576] Microemulsions of the present invention can also contain additional components and additives such as sorbitan monostearate (Grill 3), Labrasol, and penetration enhancers to improve the properties of the formulation and to enhance the absorption of the iRNAs and nucleic acids of the present invention. Penetration enhancers used in the microemulsions of the present invention can be classified as belonging to one of five broad categories—surfactants, fatty acids, bile salts, chelating agents, and non-chelating non-surfactants (Lee et al., Critical Reviews in Therapeutic Drug Carrier Systems, 1991, p. 92). Each of these classes has been discussed above.

[0577] iii. Microparticles

[0578] An iRNA agent of the invention may be incorporated into a particle, e.g., a microparticle. Microparticles can be produced by spray-drying, but may also be produced by other methods including lyophilization, evaporation, fluid bed drying, vacuum drying, or a combination of these techniques.

[0579] iv. Penetration Enhancers

[0580] In one embodiment, the present invention employs various penetration enhancers to effect the efficient delivery of nucleic acids, particularly iRNAs, to the skin of animals. Most drugs are present in solution in both ionized and nonionized forms. However, usually only lipid soluble or lipophilic drugs readily cross cell membranes. It has been discovered that even non-lipophilic drugs can cross cell membranes if the membrane to be crossed is treated with a penetration enhancer. In addition to aiding the diffusion of non-lipophilic drugs across cell membranes, penetration enhancers also enhance the permeability of lipophilic drugs.

[0581] Penetration enhancers can be classified as belonging to one of five broad categories, i.e., surfactants, fatty acids, bile salts, chelating agents, and non-chelating non-surfactants (see e.g., Malmsten, M. Surfactants and polymers in drug delivery, Informa Health Care, New York, N.Y., 2002; Lee et al., Critical Reviews in Therapeutic Drug Carrier Systems, 1991, p. 92). Each of the above mentioned classes of penetration enhancers are described below in greater detail.

[0582] Surfactants (or “surface-active agents”) are chemical entities which, when dissolved in an aqueous solution, reduce the surface tension of the solution or the interfacial tension between the aqueous solution and another liquid, with the result that absorption of iRNAs through the mucosa is enhanced. In addition to bile salts and fatty acids, these penetration enhancers include, for example, sodium lauryl sulfate, polyoxyethylene-9-lauryl ether and polyoxyethylene-20-cetyl ether) (see e.g., Malmsten, M. Surfactants and polymers in drug delivery, Informa Health Care, New York, N.Y., 2002; Lee et al., Critical Reviews in Therapeutic Drug Carrier Systems, 1991, p. 92); and perfluorochemical emulsions, such as FC-43. Takahashi et al., J. Pharm. Pharmacol., 1988, 40, 252).

[0583] Various fatty acids and their derivatives which act as penetration enhancers include, for example, oleic acid, lauric acid, capric acid (n-decanoic acid), myristic acid, palmitic acid, stearic acid, linoleic acid, linolenic acid, dicaprate, tricaprate, monoolein (1-monooleoyl-rac-glycerol), dilaurin, caprylic acid, arachidonic acid, glycerol 1-monocaprate, 1-dodecylazacycloheptan-2-one, acylcarnitines, acylcholines, C1-20 alkyl esters thereof (e.g., methyl, isopropyl and t-butyl), and mono- and di-glycerides thereof (i.e., oleate, laurate, caprate, myristate, palmitate, stearate, linoleate, etc.) (see e.g., Touitou, E., et al. Enhancement in Drug Delivery, CRC Press, Danvers, Mass., 2006; Lee et al., Critical Reviews in Therapeutic Drug Carrier Systems, 1991, p. 92; Muranishi, Critical Reviews in Therapeutic Drug Carrier Systems, 1990, 7, 1-33; El Hariri et al., J. Pharm. Pharmacol., 1992, 44, 651-654).

[0584] The physiological role of bile includes the facilitation of dispersion and absorption of lipids and fat-soluble vitamins (see e.g., Malmsten, M. Surfactants and polymers in drug delivery, Informa Health Care, New York, N.Y., 2002; Brunton, Chapter 38 in: Goodman & Gilman's The Pharmacological Basis of Therapeutics, 9th Ed., Hardman et al. Eds., McGraw-Hill, New York, 1996, pp. 934-935). Various natural bile salts, and their synthetic derivatives, act as penetration enhancers. Thus the term “bile salts” includes any of the naturally occurring components of bile as well as any of their synthetic derivatives. Suitable bile salts include, for example, cholic acid (or its pharmaceutically acceptable sodium salt, sodium cholate), dehydrocholic acid (sodium dehydrocholate), deoxycholic acid (sodium deoxycholate), glucholic acid (sodium glucholate), glycholic acid (sodium glycocholate), glycodeoxycholic acid (sodium glycodeoxycholate), taurocholic acid (sodium taurocholate), taurodeoxycholic acid (sodium taurodeoxycholate), chenodeoxycholic acid (sodium chenodeoxycholate), ursodeoxycholic acid (UDCA), sodium tauro-24,25-dihydro-fusidate (STDHF), sodium glycodihydrofusidate and polyoxyethylene-9-lauryl ether (POE) (see e.g., Malmsten, M. Surfactants and polymers in drug delivery, Informa Health Care, New York, N.Y., 2002; Lee et al., Critical Reviews in Therapeutic Drug Carrier Systems, 1991, page 92; Swinyard, Chapter 39 In: Remington's Pharmaceutical Sciences, 18th Ed., Gennaro, ed., Mack Publishing Co., Easton, Pa., 1990, pages 782-783; Muranishi, Critical Reviews in Therapeutic Drug Carrier Systems, 1990, 7, 1-33; Yamamoto et al., J. Pharm. Exp. Ther., 1992, 263, 25; Yamashita et al., J. Pharm. Sci., 1990, 79, 579-583).

[0585] Chelating agents, as used in connection with the present invention, can be defined as compounds that remove metallic ions from solution by forming complexes therewith, with the result that absorption of iRNAs through the mucosa is enhanced. With regards to their use as penetration enhancers in the present invention, chelating agents have the added advantage of also serving as DNase inhibitors, as most characterized DNA nucleases require a divalent metal ion for catalysis and are thus inhibited by chelating agents (Jarrett, J. Chromatogr., 1993, 618, 315-339). Suitable chelating agents include but are not limited to disodium ethylenediaminetetraacetate (EDTA), citric acid, salicylates (e.g., sodium salicylate, 5-methoxysalicylate and homovanilate), N-acyl derivatives of collagen, laureth-9 and N-amino acyl derivatives of beta-diketones (enamines)(see e.g., Katdare, A. et al., Excipient development for pharmaceutical, biotechnology, and drug delivery, CRC Press, Danvers, Mass., 2006; Lee et al., Critical Reviews in Therapeutic Drug Carrier Systems, 1991, page 92; Muranishi, Critical Reviews in Therapeutic Drug Carrier Systems, 1990, 7, 1-33; Buur et al., J. Control Rel., 1990, 14, 43-51).

[0586] As used herein, non-chelating non-surfactant penetration enhancing compounds can be defined as compounds that demonstrate insignificant activity as chelating agents or as surfactants but that nonetheless enhance absorption of iRNAs through the alimentary mucosa (see e.g., Muranishi, Critical Reviews in Therapeutic Drug Carrier Systems, 1990, 7, 1-33). This class of penetration enhancers includes, for example, unsaturated cyclic ureas, 1-alkyl- and 1-alkenylazacyclo-alkanone derivatives (Lee et al., Critical Reviews in Therapeutic Drug Carrier Systems, 1991, page 92); and non-steroidal anti-inflammatory agents such as diclofenac sodium, indomethacin and phenylbutazone (Yamashita et al., J. Pharm. Pharmacol., 1987, 39, 621-626).

[0587] Agents that enhance uptake of iRNAs at the cellular level can also be added to the pharmaceutical and other compositions of the present invention. For example, cationic lipids, such as lipofectin (Junichi et al, U.S. Pat. No. 5,705,188), cationic glycerol derivatives, and polycationic molecules, such as polylysine (Lollo et al., PCT Application WO 97/30731), are also known to enhance the cellular uptake of dsRNAs. Examples of commercially available transfection reagents include, for example Lipofectamine™ (Invitrogen™; Carlsbad, Calif.), Lipofectamine 2000™ (Invitrogen™; Carlsbad, Calif.), 293Fectin™ (Invitrogen™; Carlsbad, Calif.), Cellfectin™ (Invitrogen™; Carlsbad, Calif.), DMRIE-C™ (Invitrogen™; Carlsbad, Calif.), FreeStyle™ MAX (Invitrogen™; Carlsbad, Calif.), Lipofectamine™ 2000 CD (Invitrogen™; Carlsbad, Calif.), Lipofectamine™ (Invitrogen™; Carlsbad, Calif.), iRNAMAX (Invitrogen™; Carlsbad, Calif.), Oligofectamine™ (Invitrogen™; Carlsbad, Calif.), Optifect™ (Invitrogen™; Carlsbad, Calif.), X-tremeGENE Q2 Transfection Reagent (Roche; Grenzacherstrasse, Switzerland), DOTAP Liposomal Transfection Reagent (Grenzacherstrasse, Switzerland), DOSPER Liposomal Transfection Reagent (Grenzacherstrasse, Switzerland), or Fugene (Grenzacherstrasse, Switzerland), Transfectam® Reagent (Promega®; Madison, Wis.), TransFast™ Transfection Reagent (Promega®; Madison, Wis.), Tfx™-20 Reagent (Promega®; Madison, Wis.), Tfx™-50 Reagent (Promega®; Madison, Wis.), DreamFect™ (OZ Biosciences; Marseille, France), EcoTransfect (OZ Biosciences; Marseille, France), TransPass^{a} D1 Transfection Reagent (New England Biolabs™; Ipswich, Mass., USA), LyoVec™/LipoGen™ (Invitrogen™; San Diego, Calif., USA), PerFectin Transfection Reagent (Genlantis™; San Diego, Calif., USA), NeuroPORTER® Transfection Reagent (Genlantis™; San Diego, Calif., USA), GenePORTER® Transfection reagent (Genlantis™; San Diego, Calif., USA), GenePORTER® 2 Transfection reagent (Genlantis™; San Diego, Calif., USA), Cytofectin Transfection Reagent (Genlantis™; San Diego, Calif., USA), BaculoPORTER® Transfection Reagent (Genlantis™; San Diego, Calif., USA), TroganPORTER™ transfection Reagent (Genlantis™; San Diego, Calif., USA), RiboFect (Bioline™; Taunton, Mass., USA), PlasFect (Bioline™; Taunton, Mass., USA), UniFECTOR (B-Bridge International™; Mountain View, Calif., USA), SureFECTOR (B-Bridge International™; Mountain View, Calif., USA), or HiFect™ (B-Bridge International™, Mountain View, Calif., USA), among others.

[0588] Other agents can be utilized to enhance the penetration of the administered nucleic acids, including glycols such as ethylene glycol and propylene glycol, pyrrols such as 2-pyrrol, azones, and terpenes such as limonene and menthone.

[0589] v. Carriers

[0590] Certain compositions of the present invention also incorporate carrier compounds in the formulation. As used herein, “carrier compound” or “carrier” can refer to a nucleic acid, or analog thereof, which is inert (i.e., does not possess biological activity per se) but is recognized as a nucleic acid by in vivo processes that reduce the bioavailability of a nucleic acid having biological activity by, for example, degrading the biologically active nucleic acid or promoting its removal from circulation. The coadministration of a nucleic acid and a carrier compound, typically with an excess of the latter substance, can result in a substantial reduction of the amount of nucleic acid recovered in the liver, kidney or other extracirculatory reservoirs, presumably due to competition between the carrier compound and the nucleic acid for a common receptor. For example, the recovery of a partially phosphorothioate dsRNA in hepatic tissue can be reduced when it is coadministered with polyinosinic acid, dextran sulfate, polycytidic acid or 4-acetamido-4′isothiocyano-stilbene-2,2′-disulfonic acid (Miyao et al., DsRNA Res. Dev., 1995, 5, 115-121; Takakura et al., DsRNA & Nucl. Acid Drug Dev., 1996, 6, 177-183.

[0591] vi. Excipients

[0592] In contrast to a carrier compound, a “pharmaceutical carrier” or “excipient” is a pharmaceutically acceptable solvent, suspending agent or any other pharmacologically inert vehicle for delivering one or more nucleic acids to an animal. The excipient can be liquid or solid and is selected, with the planned manner of administration in mind, so as to provide for the desired bulk, consistency, etc., when combined with a nucleic acid and the other components of a given pharmaceutical composition. Typical pharmaceutical carriers include, but are not limited to, binding agents (e.g., pregelatinized maize starch, polyvinylpyrrolidone or hydroxypropyl methylcellulose, etc.); fillers (e.g., lactose and other sugars, microcrystalline cellulose, pectin, gelatin, calcium sulfate, ethyl cellulose, polyacrylates or calcium hydrogen phosphate, etc.); lubricants (e.g., magnesium stearate, talc, silica, colloidal silicon dioxide, stearic acid, metallic stearates, hydrogenated vegetable oils, corn starch, polyethylene glycols, sodium benzoate, sodium acetate, etc.); disintegrants (e.g., starch, sodium starch glycolate, etc.); and wetting agents (e.g., sodium lauryl sulphate, etc).

[0593] Pharmaceutically acceptable organic or inorganic excipients suitable for non-parenteral administration which do not deleteriously react with nucleic acids can also be used to formulate the compositions of the present invention. Suitable pharmaceutically acceptable carriers include, but are not limited to, water, salt solutions, alcohols, polyethylene glycols, gelatin, lactose, amylose, magnesium stearate, talc, silicic acid, viscous paraffin, hydroxymethylcellulose, polyvinylpyrrolidone and the like.

[0594] Formulations for topical administration of nucleic acids can include sterile and non-sterile aqueous solutions, non-aqueous solutions in common solvents such as alcohols, or solutions of the nucleic acids in liquid or solid oil bases. The solutions can also contain buffers, diluents and other suitable additives. Pharmaceutically acceptable organic or inorganic excipients suitable for non-parenteral administration which do not deleteriously react with nucleic acids can be used.

[0595] Suitable pharmaceutically acceptable excipients include, but are not limited to, water, salt solutions, alcohol, polyethylene glycols, gelatin, lactose, amylose, magnesium stearate, talc, silicic acid, viscous paraffin, hydroxymethylcellulose, polyvinylpyrrolidone and the like.

[0596] vii. Other Components

[0597] The compositions of the present invention can additionally contain other adjunct components conventionally found in pharmaceutical compositions, at their art-established usage levels. Thus, for example, the compositions can contain additional, compatible, pharmaceutically-active materials such as, for example, antipruritics, astringents, local anesthetics or anti-inflammatory agents, or can contain additional materials useful in physically formulating various dosage forms of the compositions of the present invention, such as dyes, flavoring agents, preservatives, antioxidants, opacifiers, thickening agents and stabilizers. However, such materials, when added, should not unduly interfere with the biological activities of the components of the compositions of the present invention. The formulations can be sterilized and, if desired, mixed with auxiliary agents, e.g., lubricants, preservatives, stabilizers, wetting agents, emulsifiers, salts for influencing osmotic pressure, buffers, colorings, flavorings and/or aromatic substances and the like which do not deleteriously interact with the nucleic acid(s) of the formulation.

[0598] Aqueous suspensions can contain substances which increase the viscosity of the suspension including, for example, sodium carboxymethylcellulose, sorbitol and/or dextran. The suspension can also contain stabilizers.

[0599] In some embodiments, pharmaceutical compositions featured in the invention include (a) one or more iRNA compounds and (b) one or more agents which function by a non-iRNA mechanism and which are useful in treating a hemolytic disorder. Examples of such agents include, but are not limited to an anti-inflammatory agent, anti-steatosis agent, antiviral, and/or anti-fibrosis agent. In addition, other substances commonly used to protect the liver, such as silymarin, can also be used in conjunction with the iRNAs described herein. Other agents useful for treating liver diseases include telbivudine, entecavir, and protease inhibitors such as telaprevir and other disclosed, for example, in Tung et al., U.S. Application Publication Nos. 2005/0148548, 2004/0167116, and 2003/0144217; and in Hale et al., U.S. Application Publication No. 2004/0127488.

[0600] Toxicity and therapeutic efficacy of such compounds can be determined by standard pharmaceutical procedures in cell cultures or experimental animals, e.g., for determining the LD50 (the dose lethal to 50% of the population) and the ED50 (the dose therapeutically effective in 50% of the population). The dose ratio between toxic and therapeutic effects is the therapeutic index and it can be expressed as the ratio LD50/ED50. Compounds that exhibit high therapeutic indices are preferred.

[0601] The data obtained from cell culture assays and animal studies can be used in formulating a range of dosage for use in humans. The dosage of compositions featured herein in the invention lies generally within a range of circulating concentrations that include the ED50 with little or no toxicity. The dosage can vary within this range depending upon the dosage form employed and the route of administration utilized. For any compound used in the methods featured in the invention, the therapeutically effective dose can be estimated initially from cell culture assays. A dose can be formulated in animal models to achieve a circulating plasma concentration range of the compound or, when appropriate, of the polypeptide product of a target sequence (e.g., achieving a decreased concentration of the polypeptide) that includes the IC50 (i.e., the concentration of the test compound which achieves a half-maximal inhibition of symptoms) as determined in cell culture. Such information can be used to more accurately determine useful doses in humans. Levels in plasma can be measured, for example, by high performance liquid chromatography.

[0602] In addition to their administration, as discussed above, the iRNAs featured in the invention can be administered in combination with other known agents effective in treatment of pathological processes mediated by AGT expression. In any event, the administering physician can adjust the amount and timing of iRNA administration on the basis of results observed using standard measures of efficacy known in the art or described herein.

### VII. Methods of the Invention

[0603] The present invention provides therapeutic and prophylactic methods which include administering to a subject having, or prone to developing, an AGT-associated disease, disorder, and/or condition (e.g., hypertension), pharmaceutical compositions comprising an iRNA agent, or vector comprising an iRNA of the invention.

[0604] In one aspect, the present invention provides methods of treating a subject having a disorder that would benefit from reduction in AGT expression, e.g., a AGT-associated disease, e.g. hypertension, e.g., borderline hypertension (also known as prehypertension), primary hypertension (also known as essential hypertension or idiopathic hypertension), secondary hypertension (also known as inessential hypertension), hypertensive emergency (also known as malignant hypertension), hypertensive urgency, isolated systolic or diastolic hypertension, pregnancy-associated hypertension (e.g., preeclampsia, eclampsia, and post-partum preelampsia), diabetic hypertension, resistant hypertension, refractory hypertension, paroxysmal hypertension, renovascular hypertension (also known as renal hypertension), Goldblatt hypertension, ocular hypertension, glaucoma, pulmonary hypertension, portal hypertension, systemic venous hypertension, systolic hypertension, labile hypertension; hypertensive heart disease, hypertensive nephropathy, atherosclerosis, arteriosclerosis, vasculopathy (including peripheral vascular disease), diabetic nephropathy, diabetic retinopathy, chronic heart failure, cardiomyopathy, diabetic cardiac myopathy, glomerulosclerosis, coarctation of the aorta, aortic aneurism, ventricular fibrosis, Cushing's syndrome, and other glucocorticoid excess states including chronic steroid therapy, pheochromocytoma, reninoma, secondary aldosteronism and other mineralocorticoid excess states, sleep apnea, thyroid/parathyroid disease, heart failure (e.g., left ventricular systolic dysfunction), myocardial infarction, angina, stroke, diabetes mellitus (e.g., diabetic nephropathy), renal disease e.g., chronic kidney disease or diabetic nephropathy optionally in the context of pregnancy, renal failure, e.g., chronic renal failure, cognitive dysfunction (such as Alzheimer's), and systemic sclerosis (e.g., scleroderma renal crisis). In certain embodiments, AGT-associated disease includes intrauterine growth restriction (IUGR) or fetal growth restriction. The treatment methods (and uses) of the invention include administering to the subject, e.g., a human, a therapeutically effective amount of an iRNA agent targeting an AGT gene or a pharmaceutical composition comprising an iRNA agent targeting an AGT gene, thereby treating the subject having a disorder that would benefit from reduction in AGT expression.

[0605] In one aspect, the invention provides methods of preventing at least one symptom in a subject having a disorder that would benefit from reduction in AGT expression, e.g., a AGT-associated disease, e.g., hypertension, e.g., borderline hypertension (also known as prehypertension), primary hypertension (also known as essential hypertension or idiopathic hypertension), secondary hypertension (also known as inessential hypertension), hypertensive emergency (also known as malignant hypertension), hypertensive urgency, isolated systolic or diastolic hypertension, pregnancy-associated hypertension (e.g., preeclampsia, eclampsia, and post-partum preelampsia), diabetic hypertension, resistant hypertension, refractory hypertension, paroxysmal hypertension, renovascular hypertension (also known as renal hypertension), Goldblatt hypertension, ocular hypertension, glaucoma, pulmonary hypertension, portal hypertension, systemic venous hypertension, systolic hypertension, labile hypertension; hypertensive heart disease, hypertensive nephropathy, atherosclerosis, arteriosclerosis, vasculopathy (including peripheral vascular disease), diabetic nephropathy, diabetic retinopathy, chronic heart failure, cardiomyopathy, diabetic cardiac myopathy, glomerulosclerosis, coarctation of the aorta, aortic aneurism, ventricular fibrosis, Cushing's syndrome, and other glucocorticoid excess states including chronic steroid therapy, pheochromocytoma, reninoma, secondary aldosteronism and other mineralocorticoid excess states, sleep apnea, thyroid/parathyroid disease, heart failure (e.g., left ventricular systolic dysfunction), myocardial infarction, angina, stroke, diabetes mellitus (e.g., diabetic nephropathy), renal disease e.g., chronic kidney disease or diabetic nephropathy optionally in the context of pregnancy, renal failure, e.g., chronic renal failure, cognitive dysfunction (such as Alzheimer's), and systemic sclerosis (e.g., scleroderma renal crisis). In certain embodiments, AGT-associated disease includes intrauterine growth restriction (IUGR) or fetal growth restriction The methods include administering to the subject a therapeutically effective amount of the iRNA agent, e.g., dsRNA, or vector of the invention, thereby preventing at least one symptom in the subject having a disorder that would benefit from reduction in AGT expression.

[0606] In another aspect, the present invention provides uses of a therapeutically effective amount of an iRNA agent of the invention for treating a subject, e.g., a subject that would benefit from a reduction and/or inhibition of AGT expression.

[0607] In a further aspect, the present invention provides uses of an iRNA agent, e.g., a dsRNA, of the invention targeting an AGT gene or pharmaceutical composition comprising an iRNA agent targeting an AGT gene in the manufacture of a medicament for treating a subject, e.g., a subject that would benefit from a reduction and/or inhibition of AGT expression, such as a subject having a disorder that would benefit from reduction in AGT expression, e.g., a AGT-associated disease, e.g., hypertension, e.g., borderline hypertension (also known as prehypertension), primary hypertension (also known as essential hypertension or idiopathic hypertension), secondary hypertension (also known as inessential hypertension), hypertensive emergency (also known as malignant hypertension), hypertensive urgency, isolated systolic or diastolic hypertension, pregnancy-associated hypertension (e.g., preeclampsia, eclampsia, and post-partum preelampsia), diabetic hypertension, resistant hypertension, refractory hypertension, paroxysmal hypertension, renovascular hypertension (also known as renal hypertension), Goldblatt hypertension, ocular hypertension, glaucoma, pulmonary hypertension, portal hypertension, systemic venous hypertension, systolic hypertension, labile hypertension; hypertensive heart disease, hypertensive nephropathy, atherosclerosis, arteriosclerosis, vasculopathy (including peripheral vascular disease), diabetic nephropathy, diabetic retinopathy, chronic heart failure, cardiomyopathy, diabetic cardiac myopathy, glomerulosclerosis, coarctation of the aorta, aortic aneurism, ventricular fibrosis, Cushing's syndrome, and other glucocorticoid excess states including chronic steroid therapy, pheochromocytoma, reninoma, secondary aldosteronism and other mineralocorticoid excess states, sleep apnea, thyroid/parathyroid disease, heart failure (e.g., left ventricular systolic dysfunction), myocardial infarction, angina, stroke, diabetes mellitus (e.g., diabetic nephropathy), renal disease e.g., chronic kidney disease or diabetic nephropathy optionally in the context of pregnancy, renal failure, e.g., chronic renal failure, cognitive dysfunction (such as Alzheimer's), and systemic sclerosis (e.g., scleroderma renal crisis). In certain embodiments, AGT-associated disease includes intrauterine growth restriction (IUGR) or fetal growth restriction.

[0608] In another aspect, the invention provides uses of an iRNA, e.g., a dsRNA, of the invention for preventing at least one symptom in a subject suffering from a disorder that would benefit from a reduction and/or inhibition of AGT expression, such as a AGT-associated disease, e.g., hypertension, e.g., borderline hypertension (also known as prehypertension), primary hypertension (also known as essential hypertension or idiopathic hypertension), secondary hypertension (also known as inessential hypertension), hypertensive emergency (also known as malignant hypertension), hypertensive urgency, isolated systolic or diastolic hypertension, pregnancy-associated hypertension (e.g., preeclampsia, eclampsia, and post-partum preelampsia), diabetic hypertension, resistant hypertension, refractory hypertension, paroxysmal hypertension, renovascular hypertension (also known as renal hypertension), Goldblatt hypertension, ocular hypertension, glaucoma, pulmonary hypertension, portal hypertension, systemic venous hypertension, systolic hypertension, labile hypertension; hypertensive heart disease, hypertensive nephropathy, atherosclerosis, arteriosclerosis, vasculopathy (including peripheral vascular disease), diabetic nephropathy, diabetic retinopathy, chronic heart failure, cardiomyopathy, diabetic cardiac myopathy, glomerulosclerosis, coarctation of the aorta, aortic aneurism, ventricular fibrosis, Cushing's syndrome, and other glucocorticoid excess states including chronic steroid therapy, pheochromocytoma, reninoma, secondary aldosteronism and other mineralocorticoid excess states, sleep apnea, thyroid/parathyroid disease, heart failure (e.g., left ventricular systolic dysfunction), myocardial infarction, angina, stroke, diabetes mellitus (e.g., diabetic nephropathy), renal disease e.g., chronic kidney disease or diabetic nephropathy optionally in the context of pregnancy, renal failure, e.g., chronic renal failure, cognitive dysfunction (such as Alzheimer's), and systemic sclerosis (e.g., scleroderma renal crisis). In certain embodiments, AGT-associated disease includes intrauterine growth restriction (IUGR) or fetal growth restriction.

[0609] In a further aspect, the present invention provides uses of an iRNA agent of the invention in the manufacture of a medicament for preventing at least one symptom in a subject suffering from a disorder that would benefit from a reduction and/or inhibition of AGT expression, such as a AGT-associated disease, e.g., hypertension, e.g., borderline hypertension (also known as prehypertension), primary hypertension (also known as essential hypertension or idiopathic hypertension), secondary hypertension (also known as inessential hypertension), hypertensive emergency (also known as malignant hypertension), hypertensive urgency, isolated systolic or diastolic hypertension, pregnancy-associated hypertension (e.g., preeclampsia, eclampsia, and post-partum preelampsia), diabetic hypertension, resistant hypertension, refractory hypertension, paroxysmal hypertension, renovascular hypertension (also known as renal hypertension), Goldblatt hypertension, ocular hypertension, glaucoma, pulmonary hypertension, portal hypertension, systemic venous hypertension, systolic hypertension, labile hypertension; hypertensive heart disease, hypertensive nephropathy, atherosclerosis, arteriosclerosis, vasculopathy (including peripheral vascular disease), diabetic nephropathy, diabetic retinopathy, chronic heart failure, cardiomyopathy, diabetic cardiac myopathy, glomerulosclerosis, coarctation of the aorta, aortic aneurism, ventricular fibrosis, Cushing's syndrome, and other glucocorticoid excess states including chronic steroid therapy, pheochromocytoma, reninoma, secondary aldosteronism and other mineralocorticoid excess states, sleep apnea, thyroid/parathyroid disease, heart failure (e.g., left ventricular systolic dysfunction), myocardial infarction, angina, stroke, diabetes mellitus (e.g., diabetic nephropathy), renal disease e.g., chronic kidney disease or diabetic nephropathy optionally in the context of pregnancy, renal failure, e.g., chronic renal failure, cognitive dysfunction (such as Alzheimer's), and systemic sclerosis (e.g., scleroderma renal crisis). In certain embodiments, AGT-associated disease includes intrauterine growth restriction (IUGR) or fetal growth restriction.

[0610] In one embodiment, an iRNA agent targeting AGT is administered to a subject having a AGT-associated disease such that AGT levels, e.g., in a cell, tissue, blood or other tissue or fluid of the subject are reduced by at least about 10%, 11%, 12%, 13%, 14%, 15%, 16%, 17%, 18%, 19%, 20%, 21%, 22%, 23%, 24%, 25%, 26%, 27%, 28%, 29%, 30%, 31%, 32%, 33%, 34%, 35%, 36%, 37%, 38%, 39%, 40%, 41%, 42%, 43%, 44%, 45%, 46%, 47%, 48%, 49%, 50%, 51%, 52%, 53%, 54%, 55%, 56%, 57%, 58%, 59%, 60%, 61%, 62%, 62%, 64%, 65%, 66%, 67%, 68%, 69%, 70%, 71%, 72%, 73%, 74%, 75%, 76%, 77%, 78%, 79%, 80%, 81%, 82%, 83%, 84%, 85%, 86%, 87%, 88%, 89%, 90%, 91%, 92%, 93%, 94%, 95%, 96%, 97%, 98%, or at least about 99% or more when the dsRNA agent is administered to the subject. In preferred embodiments, the AGT level is reduced by at least 20%.

[0611] The methods and uses of the invention include administering a composition described herein such that expression of the target AGT gene is decreased, such as for about 1, 2, 3, 4 5, 6, 7, 8, 12, 16, 18, 24, 28, 32, 36, 40, 44, 48, 52, 56, 60, 64, 68, 72, 76, or about 80 hours. In one embodiment, expression of the target AGT gene is decreased for an extended duration, e.g., at least about two, three, four, five, six, seven days or more, e.g., about one week, two weeks, three weeks, or about four weeks or longer.

[0612] Administration of the dsRNA according to the methods and uses of the invention may result in a reduction of the severity, signs, symptoms, and/or markers of such diseases or disorders in a patient with an AGT-associated disease. By “reduction” in this context is meant a statistically significant decrease in such level. The reduction can be, for example, at least about 5%, 10%, 15%, 20%, 25%, 30%, 35%, 40%, 45%, 50%, 55%, 60%, 65%, 70%, 75% 80%, 85%, 90%, 95%, or about 100%. In preferred embodiments, the AGT level is reduced by at least 20%.

[0613] Efficacy of treatment or prevention of disease can be assessed, for example by measuring disease progression, disease remission, symptom severity, reduction in pain, quality of life, dose of a medication required to sustain a treatment effect, level of a disease marker or any other measurable parameter appropriate for a given disease being treated or targeted for prevention. It is well within the ability of one skilled in the art to monitor efficacy of treatment or prevention by measuring any one of such parameters, or any combination of parameters. For example, efficacy of treatment of dyslipidemiahypertension may be assessed, for example, by periodic monitoring of blood pressure. Comparison of the later readings with the initial readings provide a physician an indication of whether the treatment is effective. It is well within the ability of one skilled in the art to monitor efficacy of treatment or prevention by measuring any one of such parameters, or any combination of parameters. In connection with the administration of an iRNA targeting AGT or pharmaceutical composition thereof, “effective against” an AGT-associated disease indicates that administration in a clinically appropriate manner results in a beneficial effect for at least a statistically significant fraction of patients, such as improvement of symptoms, a cure, a reduction in disease, extension of life, improvement in quality of life, or other effect generally recognized as positive by medical doctors familiar with treating a AGT-associated disease and the related causes.

[0614] A treatment or preventive effect is evident when there is a statistically significant improvement in one or more parameters of disease status, or by a failure to worsen or to develop symptoms where they would otherwise be anticipated. As an example, a favorable change of at least 10% in a measurable parameter of disease, and preferably at least 20%, 30%, 40%, 50% or more can be indicative of effective treatment. Efficacy for a given iRNA drug or formulation of that drug can also be judged using an experimental animal model for the given disease as known in the art. When using an experimental animal model, efficacy of treatment is evidenced when a statistically significant reduction in a marker or symptom is observed. Suitable animal models of an angiotensinogen-associated disease, e.g., hypertension, include, for example, genetic models of hypertension, e.g., BPH/2 mice, sponateously hypertensive rats (SHRs), Dahl salt-sensitive rates (DS), TGR(mREN2)27 transgenic rats in which endogenous renal renin has been suppressed, and borderline hypertensive rats (BHR), experimentally induced models of hypertension, e.g., experimentally induced models of renal hypertension the Goldblatt model of renal-induced experimental hypertension, subtotal nephrectomy models, and angiotensin II induced hypertension (see, e.g., Dornal and Silva (2011) J Biosci 36:731). Suitable animal models of pregnancy-associated hypertension include, for example, genetic models, e.g., borderline hypertensive mice (e.g., BPH/5 mice), rats and/or mice carrying a transgene encoding human renin and a transgene encoding human angiotensinogen, and experimentally induced models, e.g., sFlt-1 infusion models, AT₁-AA-induced models, reduced uteroplacental perfusion pressure (RUPP) models (see, e.g., McCarthy, et al. (2011) Placenta 32:413-419).

[0615] Subjects can be administered a therapeutic amount of iRNA, such as about 0.01 mg/kg, 0.02 mg/kg, 0.03 mg/kg, 0.04 mg/kg, 0.05 mg/kg, 0.1 mg/kg, 0.15 mg/kg, 0.2 mg/kg, 0.25 mg/kg, 0.3 mg/kg, 0.35 mg/kg, 0.4 mg/kg, 0.45 mg/kg, 0.5 mg/kg, 0.55 mg/kg, 0.6 mg/kg, 0.65 mg/kg, 0.7 mg/kg, 0.75 mg/kg, 0.8 mg/kg, 0.85 mg/kg, 0.9 mg/kg, 0.95 mg/kg, 1.0 mg/kg, 1.1 mg/kg, 1.2 mg/kg, 1.3 mg/kg, 1.4 mg/kg, 1.5 mg/kg, 1.6 mg/kg, 1.7 mg/kg, 1.8 mg/kg, 1.9 mg/kg, 2.0 mg/kg, 2.1 mg/kg, 2.2 mg/kg, 2.3 mg/kg, 2.4 mg/kg, 2.5 mg/kg dsRNA, 2.6 mg/kg dsRNA, 2.7 mg/kg dsRNA, 2.8 mg/kg dsRNA, 2.9 mg/kg dsRNA, 3.0 mg/kg dsRNA, 3.1 mg/kg dsRNA, 3.2 mg/kg dsRNA, 3.3 mg/kg dsRNA, 3.4 mg/kg dsRNA, 3.5 mg/kg dsRNA, 3.6 mg/kg dsRNA, 3.7 mg/kg dsRNA, 3.8 mg/kg dsRNA, 3.9 mg/kg dsRNA, 4.0 mg/kg dsRNA, 4.1 mg/kg dsRNA, 4.2 mg/kg dsRNA, 4.3 mg/kg dsRNA, 4.4 mg/kg dsRNA, 4.5 mg/kg dsRNA, 4.6 mg/kg dsRNA, 4.7 mg/kg dsRNA, 4.8 mg/kg dsRNA, 4.9 mg/kg dsRNA, 5.0 mg/kg dsRNA, 5.1 mg/kg dsRNA, 5.2 mg/kg dsRNA, 5.3 mg/kg dsRNA, 5.4 mg/kg dsRNA, 5.5 mg/kg dsRNA, 5.6 mg/kg dsRNA, 5.7 mg/kg dsRNA, 5.8 mg/kg dsRNA, 5.9 mg/kg dsRNA, 6.0 mg/kg dsRNA, 6.1 mg/kg dsRNA, 6.2 mg/kg dsRNA, 6.3 mg/kg dsRNA, 6.4 mg/kg dsRNA, 6.5 mg/kg dsRNA, 6.6 mg/kg dsRNA, 6.7 mg/kg dsRNA, 6.8 mg/kg dsRNA, 6.9 mg/kg dsRNA, 7.0 mg/kg dsRNA, 7.1 mg/kg dsRNA, 7.2 mg/kg dsRNA, 7.3 mg/kg dsRNA, 7.4 mg/kg dsRNA, 7.5 mg/kg dsRNA, 7.6 mg/kg dsRNA, 7.7 mg/kg dsRNA, 7.8 mg/kg dsRNA, 7.9 mg/kg dsRNA, 8.0 mg/kg dsRNA, 8.1 mg/kg dsRNA, 8.2 mg/kg dsRNA, 8.3 mg/kg dsRNA, 8.4 mg/kg dsRNA, 8.5 mg/kg dsRNA, 8.6 mg/kg dsRNA, 8.7 mg/kg dsRNA, 8.8 mg/kg dsRNA, 8.9 mg/kg dsRNA, 9.0 mg/kg dsRNA, 9.1 mg/kg dsRNA, 9.2 mg/kg dsRNA, 9.3 mg/kg dsRNA, 9.4 mg/kg dsRNA, 9.5 mg/kg dsRNA, 9.6 mg/kg dsRNA, 9.7 mg/kg dsRNA, 9.8 mg/kg dsRNA, 9.9 mg/kg dsRNA, 9.0 mg/kg dsRNA, 10 mg/kg dsRNA, 15 mg/kg dsRNA, 20 mg/kg dsRNA, 25 mg/kg dsRNA, 30 mg/kg dsRNA, 35 mg/kg dsRNA, 40 mg/kg dsRNA, 45 mg/kg dsRNA, or about 50 mg/kg dsRNA. Values and ranges intermediate to the recited values are also intended to be part of this invention.

[0616] In certain embodiments, for example, when a composition of the invention comprises a dsRNA as described herein and a lipid, subjects can be administered a therapeutic amount of iRNA, such as about 0.01 mg/kg to about 5 mg/kg, about 0.01 mg/kg to about 10 mg/kg, about 0.05 mg/kg to about 5 mg/kg, about 0.05 mg/kg to about 10 mg/kg, about 0.1 mg/kg to about 5 mg/kg, about 0.1 mg/kg to about 10 mg/kg, about 0.2 mg/kg to about 5 mg/kg, about 0.2 mg/kg to about 10 mg/kg, about 0.3 mg/kg to about 5 mg/kg, about 0.3 mg/kg to about 10 mg/kg, about 0.4 mg/kg to about 5 mg/kg, about 0.4 mg/kg to about 10 mg/kg, about 0.5 mg/kg to about 5 mg/kg, about 0.5 mg/kg to about 10 mg/kg, about 1 mg/kg to about 5 mg/kg, about 1 mg/kg to about 10 mg/kg, about 1.5 mg/kg to about 5 mg/kg, about 1.5 mg/kg to about 10 mg/kg, about 2 mg/kg to about 2.5 mg/kg, about 2 mg/kg to about 10 mg/kg, about 3 mg/kg to about 5 mg/kg, about 3 mg/kg to about 10 mg/kg, about 3.5 mg/kg to about 5 mg/kg, about 4 mg/kg to about 5 mg/kg, about 4.5 mg/kg to about 5 mg/kg, about 4 mg/kg to about 10 mg/kg, about 4.5 mg/kg to about 10 mg/kg, about 5 mg/kg to about 10 mg/kg, about 5.5 mg/kg to about 10 mg/kg, about 6 mg/kg to about 10 mg/kg, about 6.5 mg/kg to about 10 mg/kg, about 7 mg/kg to about 10 mg/kg, about 7.5 mg/kg to about 10 mg/kg, about 8 mg/kg to about 10 mg/kg, about 8.5 mg/kg to about 10 mg/kg, about 9 mg/kg to about 10 mg/kg, or about 9.5 mg/kg to about 10 mg/kg. Values and ranges intermediate to the recited values are also intended to be part of this invention.

[0617] For example, the dsRNA may be administered at a dose of about 0.1, 0.2, 0.3, 0.4, 0.5, 0.6, 0.7, 0.8, 0.9, 1, 1.1, 1.2, 1.3, 1.4, 1.5, 1.6, 1.7, 1.8, 1.9, 2, 2.1, 2.2, 2.3, 2.4, 2.5, 2.6, 2.7, 2.8, 2.9, 3, 3.1, 3.2, 3.3, 3.4, 3.5, 3.6, 3.7, 3.8, 3.9, 4, 4.1, 4.2, 4.3, 4.4, 4.5, 4.6, 4.7, 4.8, 4.9, 5, 5.1, 5.2, 5.3, 5.4, 5.5, 5.6, 5.7, 5.8, 5.9, 6, 6.1, 6.2, 6.3, 6.4, 6.5, 6.6, 6.7, 6.8, 6.9, 7, 7.1, 7.2, 7.3, 7.4, 7.5, 7.6, 7.7, 7.8, 7.9, 8, 8.1, 8.2, 8.3, 8.4, 8.5, 8.6, 8.7, 8.8, 8.9, 9, 9.1, 9.2, 9.3, 9.4, 9.5, 9.6, 9.7, 9.8, 9.9, or about 10 mg/kg. Values and ranges intermediate to the recited values are also intended to be part of this invention.

[0618] In other embodiments, for example, when a composition of the invention comprises a dsRNA as described herein and an N-acetylgalactosamine, subjects can be administered a therapeutic amount of iRNA, such as a dose of about 0.1 to about 50 mg/kg, about 0.25 to about 50 mg/kg, about 0.5 to about 50 mg/kg, about 0.75 to about 50 mg/kg, about 1 to about 50 mg/kg, about 1.5 to about 50 mg/kg, about 2 to about 50 mg/kg, about 2.5 to about 50 mg/kg, about 3 to about 50 mg/kg, about 3.5 to about 50 mg/kg, about 4 to about 50 mg/kg, about 4.5 to about 50 mg/kg, about 5 to about 50 mg/kg, about 7.5 to about 50 mg/kg, about 10 to about 50 mg/kg, about 15 to about 50 mg/kg, about 20 to about 50 mg/kg, about 20 to about 50 mg/kg, about 25 to about 50 mg/kg, about 25 to about 50 mg/kg, about 30 to about 50 mg/kg, about 35 to about 50 mg/kg, about 40 to about 50 mg/kg, about 45 to about 50 mg/kg, about 0.1 to about 45 mg/kg, about 0.25 to about 45 mg/kg, about 0.5 to about 45 mg/kg, about 0.75 to about 45 mg/kg, about 1 to about 45 mg/kg, about 1.5 to about 45 mg/kg, about 2 to about 45 mg/kg, about 2.5 to about 45 mg/kg, about 3 to about 45 mg/kg, about 3.5 to about 45 mg/kg, about 4 to about 45 mg/kg, about 4.5 to about 45 mg/kg, about 5 to about 45 mg/kg, about 7.5 to about 45 mg/kg, about 10 to about 45 mg/kg, about 15 to about 45 mg/kg, about 20 to about 45 mg/kg, about 20 to about 45 mg/kg, about 25 to about 45 mg/kg, about 25 to about 45 mg/kg, about 30 to about 45 mg/kg, about 35 to about 45 mg/kg, about 40 to about 45 mg/kg, about 0.1 to about 40 mg/kg, about 0.25 to about 40 mg/kg, about 0.5 to about 40 mg/kg, about 0.75 to about 40 mg/kg, about 1 to about 40 mg/kg, about 1.5 to about 40 mg/kg, about 2 to about 40 mg/kg, about 2.5 to about 40 mg/kg, about 3 to about 40 mg/kg, about 3.5 to about 40 mg/kg, about 4 to about 40 mg/kg, about 4.5 to about 40 mg/kg, about 5 to about 40 mg/kg, about 7.5 to about 40 mg/kg, about 10 to about 40 mg/kg, about 15 to about 40 mg/kg, about 20 to about 40 mg/kg, about 20 to about 40 mg/kg, about 25 to about 40 mg/kg, about 25 to about 40 mg/kg, about 30 to about 40 mg/kg, about 35 to about 40 mg/kg, about 0.1 to about 30 mg/kg, about 0.25 to about 30 mg/kg, about 0.5 to about 30 mg/kg, about 0.75 to about 30 mg/kg, about 1 to about 30 mg/kg, about 1.5 to about 30 mg/kg, about 2 to about 30 mg/kg, about 2.5 to about 30 mg/kg, about 3 to about 30 mg/kg, about 3.5 to about 30 mg/kg, about 4 to about 30 mg/kg, about 4.5 to about 30 mg/kg, about 5 to about 30 mg/kg, about 7.5 to about 30 mg/kg, about 10 to about 30 mg/kg, about 15 to about 30 mg/kg, about 20 to about 30 mg/kg, about 20 to about 30 mg/kg, about 25 to about 30 mg/kg, about 0.1 to about 20 mg/kg, about 0.25 to about 20 mg/kg, about 0.5 to about 20 mg/kg, about 0.75 to about 20 mg/kg, about 1 to about 20 mg/kg, about 1.5 to about 20 mg/kg, about 2 to about 20 mg/kg, about 2.5 to about 20 mg/kg, about 3 to about 20 mg/kg, about 3.5 to about 20 mg/kg, about 4 to about 20 mg/kg, about 4.5 to about 20 mg/kg, about 5 to about 20 mg/kg, about 7.5 to about 20 mg/kg, about 10 to about 20 mg/kg, or about 15 to about 20 mg/kg. In one embodiment, when a composition of the invention comprises a dsRNA as described herein and an N-acetylgalactosamine, subjects can be administered a therapeutic amount of about 10 to about 30 mg/kg of dsRNA. Values and ranges intermediate to the recited values are also intended to be part of this invention.

[0619] For example, subjects can be administered a therapeutic amount of iRNA, such as about 0.1, 0.2, 0.3, 0.4, 0.5, 0.6, 0.7, 0.8, 0.9, 1, 1.1, 1.2, 1.3, 1.4, 1.5, 1.6, 1.7, 1.8, 1.9, 2, 2.1, 2.2, 2.3, 2.4, 2.5, 2.6, 2.7, 2.8, 2.9, 3, 3.1, 3.2, 3.3, 3.4, 3.5, 3.6, 3.7, 3.8, 3.9, 4, 4.1, 4.2, 4.3, 4.4, 4.5, 4.6, 4.7, 4.8, 4.9, 5, 5.1, 5.2, 5.3, 5.4, 5.5, 5.6, 5.7, 5.8, 5.9, 6, 6.1, 6.2, 6.3, 6.4, 6.5, 6.6, 6.7, 6.8, 6.9, 7, 7.1, 7.2, 7.3, 7.4, 7.5, 7.6, 7.7, 7.8, 7.9, 8, 8.1, 8.2, 8.3, 8.4, 8.5, 8.6, 8.7, 8.8, 8.9, 9, 9.1, 9.2, 9.3, 9.4, 9.5, 9.6, 9.7, 9.8, 9.9, 10, 10.5, 11, 11.5, 12, 12.5, 13, 13.5, 14, 14.5, 15, 15.5, 16, 16.5, 17, 17.5, 18, 18.5, 19, 19.5, 20, 20.5, 21, 21.5, 22, 22.5, 23, 23.5, 24, 24.5, 25, 25.5, 26, 26.5, 27, 27.5, 28, 28.5, 29, 29.5, 30, 31, 32, 33, 34, 34, 35, 36, 37, 38, 39, 40, 41, 42, 43, 44, 45, 46, 47, 48, 49, or about 50 mg/kg. Values and ranges intermediate to the recited values are also intended to be part of this invention.

[0620] In certain embodiments of the invention, for example, when a double-stranded RNAi agent includes a modification (e.g., one or more motifs of three identical modifications on three consecutive nucleotides), including one such motif at or near the cleavage site of the agent, six phosphorothioate linkages, and a ligand, such an agent is administered at a dose of about 0.01 to about 0.5 mg/kg, about 0.01 to about 0.4 mg/kg, about 0.01 to about 0.3 mg/kg, about 0.01 to about 0.2 mg/kg, about 0.01 to about 0.1 mg/kg, about 0.01 mg/kg to about 0.09 mg/kg, about 0.01 mg/kg to about 0.08 mg/kg, about 0.01 mg/kg to about 0.07 mg/kg, about 0.01 mg/kg to about 0.06 mg/kg, about 0.01 mg/kg to about 0.05 mg/kg, about 0.02 to about 0.5 mg/kg, about 0.02 to about 0.4 mg/kg, about 0.02 to about 0.3 mg/kg, about 0.02 to about 0.2 mg/kg, about 0.02 to about 0.1 mg/kg, about 0.02 mg/kg to about 0.09 mg/kg, about 0.02 mg/kg to about 0.08 mg/kg, about 0.02 mg/kg to about 0.07 mg/kg, about 0.02 mg/kg to about 0.06 mg/kg, about 0.02 mg/kg to about 0.05 mg/kg, about 0.03 to about 0.5 mg/kg, about 0.03 to about 0.4 mg/kg, about 0.03 to about 0.3 mg/kg, about 0.03 to about 0.2 mg/kg, about 0.03 to about 0.1 mg/kg, about 0.03 mg/kg to about 0.09 mg/kg, about 0.03 mg/kg to about 0.08 mg/kg, about 0.03 mg/kg to about 0.07 mg/kg, about 0.03 mg/kg to about 0.06 mg/kg, about 0.03 mg/kg to about 0.05 mg/kg, about 0.04 to about 0.5 mg/kg, about 0.04 to about 0.4 mg/kg, about 0.04 to about 0.3 mg/kg, about 0.04 to about 0.2 mg/kg, about 0.04 to about 0.1 mg/kg, about 0.04 mg/kg to about 0.09 mg/kg, about 0.04 mg/kg to about 0.08 mg/kg, about 0.04 mg/kg to about 0.07 mg/kg, about 0.04 mg/kg to about 0.06 mg/kg, about 0.05 to about 0.5 mg/kg, about 0.05 to about 0.4 mg/kg, about 0.05 to about 0.3 mg/kg, about 0.05 to about 0.2 mg/kg, about 0.05 to about 0.1 mg/kg, about 0.05 mg/kg to about 0.09 mg/kg, about 0.05 mg/kg to about 0.08 mg/kg, or about 0.05 mg/kg to about 0.07 mg/kg. Values and ranges intermediate to the foregoing recited values are also intended to be part of this invention, e.g., the RNAi agent may be administered to the subject at a dose of about 0.015 mg/kg to about 0.45 mg/kg.

[0621] For example, the RNAi agent, e.g., RNAi agent in a pharmaceutical composition, may be administered at a dose of about 0.01 mg/kg, 0.0125 mg/kg, 0.015 mg/kg, 0.0175 mg/kg, 0.02 mg/kg, 0.0225 mg/kg, 0.025 mg/kg, 0.0275 mg/kg, 0.03 mg/kg, 0.0325 mg/kg, 0.035 mg/kg, 0.0375 mg/kg, 0.04 mg/kg, 0.0425 mg/kg, 0.045 mg/kg, 0.0475 mg/kg, 0.05 mg/kg, 0.0525 mg/kg, 0.055 mg/kg, 0.0575 mg/kg, 0.06 mg/kg, 0.0625 mg/kg, 0.065 mg/kg, 0.0675 mg/kg, 0.07 mg/kg, 0.0725 mg/kg, 0.075 mg/kg, 0.0775 mg/kg, 0.08 mg/kg, 0.0825 mg/kg, 0.085 mg/kg, 0.0875 mg/kg, 0.09 mg/kg, 0.0925 mg/kg, 0.095 mg/kg, 0.0975 mg/kg, 0.1 mg/kg, 0.125 mg/kg, 0.15 mg/kg, 0.175 mg/kg, 0.2 mg/kg, 0.225 mg/kg, 0.25 mg/kg, 0.275 mg/kg, 0.3 mg/kg, 0.325 mg/kg, 0.35 mg/kg, 0.375 mg/kg, 0.4 mg/kg, 0.425 mg/kg, 0.45 mg/kg, 0.475 mg/kg, or about 0.5 mg/kg. Values intermediate to the foregoing recited values are also intended to be part of this invention.

[0622] The iRNA can be administered by intravenous infusion over a period of time, such as over a 5, 6, 7, 8, 9, 10, 11, 12, 13, 14, 15, 16, 17, 18, 19, 20, 21, 22, 23, 24, or about a 25 minute period. The administration may be repeated, for example, on a regular basis, such as weekly, biweekly (i.e., every two weeks) for one month, two months, three months, four months or longer. After an initial treatment regimen, the treatments can be administered on a less frequent basis. For example, after administration weekly or biweekly for three months, administration can be repeated once per month, for six months or a year or longer.

[0623] Administration of the iRNA can reduce AGT levels, e.g., in a cell, tissue, blood, urine or other compartment of the patient by at least about 5%, 6%, 7%, 8%, 9%, 10%, 11%, 12%, 13%, 14%, 15%, 16%, 17%, 18%, 19%, 20%, 21%, 22%, 23%, 24%, 25%, 26%, 27%, 28%, 29%, 30%, 31%, 32%, 33%, 34%, 35%, 36%, 37%, 38%, 39%, 40%, 41%, 42%, 43%, 44%, 45%, 46%, 47%, 48%, 49%, 50%, 51%, 52%, 53%, 54%, 55%, 56%, 57%, 58%, 59%, 60%, 61%, 62%, 63%, 64%, 65%, 66%, 67%, 68%, 69%, 70%, 71%, 72%, 73%, 74%, 75%, 76%, 77%, 78%, 79%, 80%, 81%, 82%, 83%, 84%, 85%, 86%, 87%, 88%, 89%, 90%, 91%, 92%, 93%, 94%, 95%, 96%, 97%, 98%, or at least about 99% or more.

[0624] Before administration of a full dose of the iRNA, patients can be administered a smaller dose, such as a 5% infusion, and monitored for adverse effects, such as an allergic reaction. In another example, the patient can be monitored for unwanted immunostimulatory effects, such as increased cytokine (e.g., TNF-alpha or INF-alpha) levels.

[0625] Owing to the inhibitory effects on AGT expression, a composition according to the invention or a pharmaceutical composition prepared therefrom can enhance the quality of life.

[0626] An iRNA of the invention may be administered in “naked” form, where the modified or unmodified iRNA agent is directly suspended in aqueous or suitable buffer solvent, as a “free iRNA.” A free iRNA is administered in the absence of a pharmaceutical composition.

[0627] The free iRNA may be in a suitable buffer solution. The buffer solution may comprise acetate, citrate, prolamine, carbonate, or phosphate, or any combination thereof. In one embodiment, the buffer solution is phosphate buffered saline (PBS). The pH and osmolarity of the buffer solution containing the iRNA can be adjusted such that it is suitable for administering to a subject.

[0628] Alternatively, an iRNA of the invention may be administered as a pharmaceutical composition, such as a dsRNA liposomal formulation.

[0629] Subjects that would benefit from a reduction and/or inhibition of AGT gene expression are those having a AGT-associated disease or disorder as described herein.

[0630] Treatment of a subject that would benefit from a reduction and/or inhibition of AGT gene expression includes therapeutic and prophylactic treatment.

[0631] The invention further provides methods and uses of an iRNA agent or a pharmaceutical composition thereof for treating a subject that would benefit from reduction and/or inhibition of AGT expression, e.g., a subject having a AGT-associated disease, in combination with other pharmaceuticals and/or other therapeutic methods, e.g., with known pharmaceuticals and/or known therapeutic methods, such as, for example, those which are currently employed for treating these disorders. For example, in certain embodiments, an iRNA targeting AGT is administered in combination with, e.g., an agent useful in treating an AGT-associated disease as described elsewhere herein. For example, additional therapeutics and therapeutic methods suitable for treating a subject that would benefit from reduction in AGT expression, e.g., a subject having a AGT-associated disease, include angioplasty, aortorenal bypass, renal denervation, percutaneous transluminal renal angioplasty (PTRA) and stenting, surgical revascularization, catheter-based renal sympathetic denervation, and surgical removal of pheochromocytoma or reninoma, adrenalectomy, treatment with a diuretic, e.g., a thiazide-type diuretic, e.g., chlorothiazide, hydrochlorothiazide, chlorthalidone, metolazone, and indapamide, a potassium-sparring diuretic, such as triamterene and amiloride, a loop diuretic, e.g., furosemide, torsemide, ethacrynic acid, and bumetanide; an angiotensin converting enzyme (ACE) inhibitor, e.g., fosinopril, captopril, ramipril, enalapril, lisinopril, and quinapril; an angiotensin II receptor antagonist (also known as an angiotensin receptor blocker), e.g., losartan, valsartan, olmesartan, eprosartan, and azilsartan; a beta-blocker, such as a beta-1 selective beta-blocker, e.g., atenolol, metoprolol, propranolol, bisoprolol, and timolol, an alpha-1 receptor beta-blocker, e.g., labetalol, esmolol, and carvedilol, an intrinsic sympathomimetic beta-blocker, e.g., acebutolol and pindolol; a vasodialator, e.g., hydralazine, minoxidil, sodium nitroprusside, and nitroglycerin; a calcium channel blocker, e.g., nifedipine, clevidipine, amlodipine, felodipine, diltiazem, nicardipine, and verapamil; an aldosterone antagonist, such as a selective aldosterone antagonist, e.g., eplerenone and spironolactone; an alpha₂-agonist, such as a central-acting alpha₂-agonist, e.g., methyldopa, clonidine, and guanfacine, a renin inhibitor, e.g., aliskiren; an alpha-blocker, e.g., prazosin, terazosin, and doxazosin; a peripheral acting adrenergic agent, e.g., reserpine; a selective D1 receptor partial agonist, e.g., fenoldopam mesylate; a nonselective alpha-adrenergic antagonist, e.g., phentolamine; a synthetic, steroidal antimineralocorticoid agent, e.g., spironolactone, or a combination of any of the foregoing; and a therapeutic agent formulated as a combination of agents, e.g., a combination of amlodipine/benazepril (Lotrel), amlodipine/olmesartan (Azor), amlodipine/telmisartan (Twynsta), amlodipine/valsartan (Exforge), amlodipine/valsartan/hydrochlorothiazide (Exforge HCT), amlodipine/aliskiren (Tekamlo), amlodipine/aliskiren/hydrochlorothiazide (Amturnide), olmesartan/amlodipine/hydrochlorothiazide (Tribenzor), trandolapril/verapamil (Tarka), benazepril/hydrochlorothiazide (Lotensin HCT), captopril/hydrochlorothiazide (Capozide), enalapril/hydrochlorothiazide (Vaseretic), fosinopril/hydrochlorothiazide, lisinopril/hydrochlorothiazide (Prinzide, Zestoretic), moexipril/hydrochlorothiazide (Uniretic), quinapril/hydrochlorothiazide (Accuretic), candesartan/hydrochlorothiazide (Atacand HCT), eprosartan/hydrochlorothiazide (Teveten HCT), irbesartan/hydrochlorothiazide (Avalide), losartan/hydrochlorothiazide (Hyzaar), olmesartan/hydrochlorothiazide (Benicar HCT), telmisartan/hydrochlorothiazide (Micardis HCT), valsartan/hydrochlorothiazide (Diovan HCT), atenolol/chlorthalidone (Tenoretic), bisoprolol/hydrochlorothiazide (Ziac), metoprolol/hydrochlorothiazide (Lopressor HCT), nadolol/bendroflumethiazide (Corzide), propranolol/hydrochlorothiazide, aliskiren/hydrochlorothiazide (Tekturna HCT), clonidine/chlorthalidone (Clorpres), spironolactone/hydrochlorothiazide (Aldactazide), triamterene/hydrochlorothiazide (Dyazide, Maxzide), methyldopa/hydrochlorothiazide, and amiloride/hydrochlorothiazide, or other therapeutic agents for treating a AGT-associated disease.

[0632] The iRNA agent and an additional therapeutic agent and/or treatment may be administered at the same time and/or in the same combination, e.g., parenterally, or the additional therapeutic agent can be administered as part of a separate composition or at separate times and/or by another method known in the art or described herein.

[0633] The present invention also provides methods of using an iRNA agent of the invention and/or a composition containing an iRNA agent of the invention to reduce and/or inhibit AGT expression in a cell. In other aspects, the present invention provides an iRNA of the invention and/or a composition comprising an iRNA of the invention for use in reducing and/or inhibiting AGT expression in a cell. In yet other aspects, use of an iRNA of the invention and/or a composition comprising an iRNA of the invention for the manufacture of a medicament for reducing and/or inhibiting AGT expression in a cell are provided.

[0634] The methods and uses include contacting the cell with an iRNA, e.g., a dsRNA, of the invention and maintaining the cell for a time sufficient to obtain degradation of the mRNA transcript of an AGT gene, thereby inhibiting expression of the AGT gene in the cell.

[0635] Reduction in gene expression can be assessed by any methods known in the art. For example, a reduction in the expression of AGT may be determined by determining the mRNA expression level of AGT using methods routine to one of ordinary skill in the art, e.g., northern blotting, qRT-PCR, by determining the protein level of AGT using methods routine to one of ordinary skill in the art, such as western blotting, immunological techniques, flow cytometry methods, ELISA, and/or by determining a biological activity of AGT.

[0636] In the methods and uses of the invention the cell may be contacted in vitro or in vivo, i.e., the cell may be within a subject.

[0637] A cell suitable for treatment using the methods of the invention may be any cell that expresses an AGT gene. A cell suitable for use in the methods and uses of the invention may be a mammalian cell, e.g., a primate cell (such as a human cell or a non-human primate cell, e.g., a monkey cell or a chimpanzee cell), a non-primate cell (such as a cow cell, a pig cell, a camel cell, a llama cell, a horse cell, a goat cell, a rabbit cell, a sheep cell, a hamster, a guinea pig cell, a cat cell, a dog cell, a rat cell, a mouse cell, a lion cell, a tiger cell, a bear cell, or a buffalo cell), a bird cell (e.g., a duck cell or a goose cell), or a whale cell. In one embodiment, the cell is a human cell, e.g., a human liver cell.

[0638] AGT expression may be inhibited in the cell by at least about 5%, 6%, 7%, 8%, 9%, 10%, 11%, 12%, 13%, 14%, 15%, 16%, 17%, 18%, 19%, 20%, 21%, 22%, 23%, 24%, 25%, 26%, 27%, 28%, 29%, 30%, 31%, 32%, 33%, 34%, 35%, 36%, 37%, 38%, 39%, 40%, 41%, 42%, 43%, 44%, 45%, 46%, 47%, 48%, 49%, 50%, 51%, 52%, 53%, 54%, 55%, 56%, 57%, 58%, 59%, 60%, 61%, 62%, 63%, 64%, 65%, 66%, 67%, 68%, 69%, 70%, 71%, 72%, 73%, 74%, 75%, 76%, 77%, 78%, 79%, 80%, 81%, 82%, 83%, 84%, 85%, 86%, 87%, 88%, 89%, 90%, 91%, 92%, 93%, 94%, 95%, 96%, 97%, 98%, 99%, or about 100%. In preferred embodiments, the AGT level is reduced by at least 20%.

[0639] The in vivo methods and uses of the invention may include administering to a subject a composition containing an iRNA, where the iRNA includes a nucleotide sequence that is complementary to at least a part of an RNA transcript of the AGT gene of the mammal to be treated. When the organism to be treated is a human, the composition can be administered by any means known in the art including, but not limited to subcutaneous, intravenous, oral, intraperitoneal, or parenteral routes, including intracranial (e.g., intraventricular, intraparenchymal and intrathecal), intramuscular, transdermal, airway (aerosol), nasal, rectal, and topical (including buccal and sublingual) administration. In certain embodiments, the compositions are administered by subcutaneous or intravenous infusion or injection.

[0640] In some embodiments, the administration is via a depot injection. A depot injection may release the iRNA in a consistent way over a prolonged time period. Thus, a depot injection may reduce the frequency of dosing needed to obtain a desired effect, e.g., a desired inhibition of AGT, or a therapeutic or prophylactic effect. A depot injection may also provide more consistent serum concentrations. Depot injections may include subcutaneous injections or intramuscular injections. In preferred embodiments, the depot injection is a subcutaneous injection.

[0641] In some embodiments, the administration is via a pump. The pump may be an external pump or a surgically implanted pump. In certain embodiments, the pump is a subcutaneously implanted osmotic pump. In other embodiments, the pump is an infusion pump. An infusion pump may be used for intravenous, subcutaneous, arterial, or epidural infusions. In preferred embodiments, the infusion pump is a subcutaneous infusion pump. In other embodiments, the pump is a surgically implanted pump that delivers the iRNA to the liver.

[0642] A higher dose may be administered initially (i.e., a loading dose), followed by a lower dosage for a sustained period of time.

[0643] The mode of administration may be chosen based upon whether local or systemic treatment is desired and based upon the area to be treated. The route and site of administration may be chosen to enhance targeting.

[0644] In one aspect, the present invention also provides methods for inhibiting the expression of an AGT gene in a mammal, e.g., a human. The present invention also provides a composition comprising an iRNA, e.g., a dsRNA, that targets an AGT gene in a cell of a mammal for use in inhibiting expression of the AGT gene in the mammal. In another aspect, the present invention provides use of an iRNA, e.g., a dsRNA, that targets an AGT gene in a cell of a mammal in the manufacture of a medicament for inhibiting expression of the AGT gene in the mammal.

[0645] The methods and uses include administering to the mammal, e.g., a human, a composition comprising an iRNA, e.g., a dsRNA, that targets an AGT gene in a cell of the mammal and maintaining the mammal for a time sufficient to obtain degradation of the mRNA transcript of the AGT gene, thereby inhibiting expression of the AGT gene in the mammal.

[0646] Reduction in gene expression can be assessed in peripheral blood sample of the iRNA-administered subject by any methods known it the art, e.g. qRT-PCR, described herein. Reduction in protein production can be assessed by any methods known it the art and by methods, e.g., ELISA or western blotting, described herein. In one embodiment, a puncture liver biopsy sample serves as the tissue material for monitoring the reduction in AGT gene and/or protein expression. In another embodiment, a blood sample serves as the tissue material for monitoring the reduction in AGT gene and/or protein expression.

[0647] In one embodiment, verification of RISC medicated cleavage of target in vivo following administration of iRNA agent is done by performing 5′-RACE or modifications of the protocol as known in the art (Lasham A et al., (2010) Nucleic Acid Res., 38 (3) p-e19) (Zimmermann et al. (2006) Nature 441: 111-4).

[0648] This invention is further illustrated by the following examples which should not be construed as limiting. The entire contents of all references, patents and published patent applications cited throughout this application, as well as the Figures and the Sequence Listing, are hereby incorporated herein by reference.

### EXAMPLES

### Example 1. iRNA Synthesis

### Source of Reagents

[0649] Where the source of a reagent is not specifically given herein, such reagent can be obtained from any supplier of reagents for molecular biology at a quality/purity standard for application in molecular biology.

### Transcripts

[0650] siRNA design was carried out to identify siRNAs targeting human (Homo sapiens), cynomolgus monkey (Macaca fascicularis; henceforth “cyno”), mouse (Mus musculus), and rat (Rattus norvegicus) AGT transcripts annotated in the NCBI Gene database (www.ncbi.nlm.nih.gov/gene/). Design used the following transcripts from NCBI: Human—NM_000029.3; Monkey—AB170313.1; Mouse—NM_007428.3. The cynomolgus monkey transcript was extended using sequence obtained from a liver-derived cDNA library. Due to high primate/rodent sequence divergence, siRNA duplexes were designed in separate batches, including but not limited to batches containing duplexes matching human and monkey transcripts only and mouse transcript only. All siRNA duplexes were designed that shared 100% identity to the listed human transcript and other species transcripts considered in each design batch.

siRNA Design, Specificity, and Efficacy Prediction

[0651] The predicted specificity of all possible 19mers was predicted from each sequence. Candidate 19mers were then selected that lacked repeats longer than seven nucleotides. These 706 candidate human/monkey and 1815 mouse siRNAs were used in comprehensive searches against the appropriate transcriptomes (defined as the set of NM_and XM_records within the human, monkey, or mouse NCBI Refseq sets) using an exhaustive “brute-force” algorithm implemented in the python script ‘BruteForce.py’. The script next parsed the transcript-oligo alignments to generate a score based on the position and number of mismatches between the siRNA and any potential “off-target” transcript. The off-target score was weighted to emphasize differences in the “seed region” of siRNAs, in positions 2-9 from the 5′ end of the molecule. Each oligo-transcript pair from the brute-force search was given a mismatch score by summing the individual mismatch scores; mismatches in the position 2-9 were counted as 2.8, mismatches in the cleavage site positions 10-11 were counted as 1.2, and mismatches in region 12-19 counted as 1.0. An additional off-target prediction was carried out by comparing the frequency of heptamers and octamers derived from 3 distinct, seed-derived hexamers of each oligo. The hexamers from positions 2-7 relative to the 5′ start is used to create 2 heptamers and one octamer. “Heptamer1” was created by adding a 3′ A to the hexamer; “heptamer2” was created by adding a 5′ A to the hexamer; the octamer was created by adding an A to both 5′ and 3′ ends of the hexamer. The frequency of octomers and heptamers in the human, monkey, or mouse 3′UTRome (defined as the subsequence of the transcriptome from NCBI's Refseq database where the end of the coding region, the ‘CDS’, is clearly defined) was pre-calculated. The octamer frequency was normalized to the heptamer frequency using the median value from the range of octamer frequencies. A “mirSeedScore” was then calculated by calculating the sum of ((3×normalized octomer count)+(2×heptamer2 count)+(1×heptamer1 count)).

[0652] Both siRNA strands were assigned to a category of specificity according to the calculated scores: a score above 3 qualifies as highly specific, equal to 3 as specific and between 2.2 and 2.8 as moderately specific. The duplexes were sorted by the specificity of the antisense strand. Duplexes from the human/monkey and mouse sets whose antisense oligos lacked GC at the first position, lacked G at both positions 13 and 14, and had 3 or more Us or As in the seed region (characteristics of duplexes with high predicted efficacy) were selected.

[0653] Candidate GalNAc-conjugated duplexes, 21 and 23 nucleotides long on the sense and antisense strands, respectively, were designed by extending antisense 19mers four additional nucleotides in the 3′ direction (preserving perfect complementarity with the target transcript). The sense strand was specified as the reverse complement of the first 21 nucleotides of the antisense 23mer. Duplexes were selected that maintained perfect matches to all selected species transcripts across all 23 nucleotides.

siRNA Sequence Selection

[0654] A total of 117 sense and 117 antisense derived human/monkey and 42 sense and 42 antisense derived mouse siRNA 19mer oligos were synthesized and formed into GalNAc-conjugated duplexes. A total of 38 sense and 38 antisense derived human/monkey 21/23mer oligos and a total of 26 mouse 21/23mer oligos were synthesized and formed into GalNAc-conjugated duplexes.

[0655] A detailed list of the unmodified 19mer AGT sense and antisense strand sequences is shown in Table 3.

[0656] A detailed list of the modified 19mer AGT sense and antisense strand sequences is shown in Table 4.

[0657] A detailed list of the unmodified 21/23mer AGT sense and antisense strand sequences is shown in Table 7.

[0658] A detailed list of the modified 21/23mer AGT sense and antisense strand sequences is shown in Table 8.

[0659] A detailed list of unmodified 19mer AGT sense and antisense strand sequences is shown in Table 11.

[0660] A detailed list of the unmodified 21/23mer AGT sense and antisense strand sequences is shown in Table 13.

[0661] A detailed list of the modified 21/23mer AGT sense and antisense strand sequences is shown in Table 15.

siRNA Synthesis

[0662] General Small and Medium Scale RNA Synthesis Procedure

[0663] RNA oligonucleotides are synthesized at scales between 0.2-500 μmol using commercially available 5′-O-(4,4′-dimethoxytrityl)-2′-O-t-butyldimethylsilyl-3′-O-(2-cyanoethyl-N,N-diisopropyl)phosphoramidite monomers of uridine, 4-N-acetylcytidine, 6-N-benzoyladenosine and 2-N-isobutyrylguanosine and the corresponding 2′-O-methyl and 2′-fluoro phosphoramidites according to standard solid phase oligonucleotide synthesis protocols. The amidite solutions are prepared at 0.1-0.15 M concentration and 5-ethylthio-1H-tetrazole (0.25-0.6 M in acetonitrile) is used as the activator. Phosphorothioate backbone modifications are introduced during synthesis using 0.2 M phenylacetyl disulfide (PADS) in lutidine:acetonitrile (1:1) (v;v) or 0.1 M 3-(dimethylaminomethylene) amino-3H-1,2,4-dithiazole-5-thione (DDTT) in pyridine for the oxidation step. After completion of synthesis, the sequences are cleaved from the solid support and deprotected using methylamine followed by triethylamine.3HF to remove any 2′-O-t-butyldimethylsilyl protecting groups present.

[0664] For synthesis scales between 5-500 μmol and fully 2′ modified sequences (2′-fluoro and/or 2′-O-methyl or combinations thereof) the oligonucleotides are deprotected using 3:1 (v/v) ethanol and concentrated (28-32%) aqueous ammonia either at 35° C. 16 h or 55° C. for 5.5 h. Prior to ammonia deprotection the oligonucleotides are treated with 0.5 M piperidine in acetonitrile for 20 min on the solid support. The crude oligonucleotides are analyzed by LC-MS and anion-exchange HPLC (IEX-HPLC). Purification of the oligonucleotides is carried out by IEX HPLC using: 20 mM phosphate, 10%-15% ACN, pH=8.5 (buffer A) and 20 mM phosphate, 10%-15% ACN, 1 M NaBr, pH=8.5 (buffer B). Fractions are analyzed for purity by analytical HPLC. The product-containing fractions with suitable purity are pooled and concentrated on a rotary evaporator prior to desalting. The samples are desalted by size exclusion chromatography and lyophilized to dryness. Equal molar amounts of sense and antisense strands are annealed in 1×PBS buffer to prepare the corresponding siRNA duplexes.

[0665] For small scales (0.2-1 μmol), synthesis is performed on a MerMade 192 synthesizer in a 96 well format. In case of fully 2′-modified sequences (2′-fluoro and/or 2′-O-methyl or combinations thereof) the oligonucleotides are deprotected using methylamine at room temperature for 30-60 min followed by incubation at 60° C. for 30 min or using 3:1 (v/v) ethanol and concentrated (28-32%) aqueous ammonia at room temperature for 30-60 min followed by incubation at 40° C. for 1.5 hours. The crude oligonucleotides are then precipitated in a solution of acetonitrile:acetone (9:1) and isolated by centrifugation and decanting the supernatant. The crude oligonucleotide pellet is re-suspended in 20 mM NaOAc buffer and analyzed by LC-MS and anion exchange HPLC. The crude oligonucleotide sequences are desalted in 96 deep well plates on a 5 mL HiTrap Sephadex G25 column (GE Healthcare). In each well about 1.5 mL samples corresponding to an individual sequence is collected. These purified desalted oligonucleotides are analyzed by LC-MS and anion exchange chromatography. Duplexes are prepared by annealing equimolar amounts of sense and antisense sequences on a Tecan robot. Concentration of duplexes is adjusted to 10 μM in 1×PBS buffer.

[0666] Synthesis of GalNAc-Conjugated Oligonucleotides for In Vivo Analysis

[0667] Oligonucleotides conjugated with GalNAc ligand at their 3′-terminus are synthesized at scales between 0.2-500 μmol using a solid support pre-loaded with a Y-shaped linker bearing a 4,4′-dimethoxytrityl (DMT)-protected primary hydroxy group for oligonucleotide synthesis and a GalNAc ligand attached through a tether.

[0668] For synthesis of GalNAc conjugates in the scales between 5-500 μmol, the above synthesis protocol for RNA is followed with the following adaptions: For polystyrene-based synthesis supports 5% dichloroacetic acid in toluene is used for DMT-cleavage during synthesis. Cleavage from the support and deprotection is performed as described above. Phosphorothioate-rich sequences (usually >5 phorphorothioates) are synthesized without removing the final 5′-DMT group (“DMT-on”) and, after cleavage and deprotection as described above, purified by reverse phase HPLC using 50 mM ammonium acetate in water (buffer A) and 50 mM ammoniumacetate in 80% acetonitirile (buffer B). Fractions are analyzed for purity by analytical HPLC and/or LC-MS. The product-containing fractions with suitable purity are pooled and concentrated on a rotary evaporator. The DMT-group is removed using 20%-25% acetic acid in water until completion. The samples are desalted by size exclusion chromatography and lyophilized to dryness. Equal molar amounts of sense and antisense strands are annealed in 1×PBS buffer to prepare the corresponding siRNA duplexes.

[0669] For small scale synthesis of GalNAc conjugates (0.2-1 μmol), including sequences with multiple phosphorothioate linkages, the protocols described above for synthesis of RNA or fully 2′-F/2′-OMe-containing sequences on MerMade platform are applied. Synthesis is performed on pre-packed columns containing GalNAc-functionalized controlled pore glass support.

### Example 2. In Vitro Screening of siRNA Duplexes

### Cell Culture and 96-Well Transfections

[0670] Hep3B cells (ATCC, Manassas, Va.) were grown to near confluence at 37° C. in an atmosphere of 5% CO₂ in Eagle's Minimum Essential Medium (ATCC) supplemented with 10% FBS, streptomycin, and glutamine (ATCC) before being released from the plate by trypsinization. Cells were washed and re-suspended at 0.125×10⁶ cells/ml. During transfections, cells were plated onto a 96-well plate with about 20,000 cells per well.

[0671] Transfection was carried out by adding 14.8 μl of Opti-MEM plus 0.2 μl of Lipofectamine RNAiMax per well (Invitrogen™, Carlsbad Calif. catalog number 13778-150) to 5 μl of each siRNA duplex to an individual well in a 96-well plate. The mixture was then incubated at room temperature for 20 minutes. Eighty μl of complete growth media without antibiotic containing the appropriate cell number was then added to the siRNA mixture. Cells were incubated for 24 hours prior to RNA purification.

[0672] Single dose experiments were performed at 10 nM and 0.01 nM final duplex concentration. Dose response experiments were done at 10, 1.67, 0.28, 0.046, 0.0077, 0.0013, 0.00021, 0.000036 nM final duplex concentration.

### Cell Culture and 384-Well Transfections

[0673] Hep3B cells (ATCC, Manassas, Va.) were grown to near confluence at 37° C. in an atmosphere of 5% CO₂ in Eagle's Minimum Essential Medium (ATCC®) supplemented with 10% FBS, streptomycin, and glutamine (ATCC®) before being released from the plate by trypsinization. Cells were washed and re-suspended at 0.125×10⁶ cells/ml. During transfections, cells were plated onto a 384-well plate with about 5,000 cells per well.

[0674] Transfection was carried out by adding 4.9 μl of Opti-MEM plus 0.1 μl of Lipofectamine RNAiMax per well (Invitrogen™, Carlsbad Calif. catalog number 13778-150) to 5 μl of each siRNA duplex to an individual well in a 96-well plate. The mixture was then incubated at room temperature for 20 minutes. Forty μl of complete growth media without antibiotic containing the appropriate cell number was then added to the siRNA mixture. Cells were incubated for 24 hours prior to RNA purification.

[0675] Single dose experiments were performed at 10 nM and 0.01 nM final duplex concentration. Dose response experiments were done at 10, 1.67, 0.28, 0.046, 0.0077, 0.0013, 0.00021, 0.000036 nM final duplex concentration

Total RNA Isolation Using DYNABEADS mRNA Isolation Kit (Invitrogen™, Part #: 610-12) 96-Well Isolation

[0676] Cells were harvested and lysed in 150 μl of Lysis/Binding Buffer then mixed for five minutes at 850 rpm using an Eppendorf Thermomixer (the mixing speed was the same throughout the process). Ten microliters of magnetic beads and 80 μl Lysis/Binding Buffer mixture were added to a round bottom plate and mixed for 1 minute. Magnetic beads were captured using magnetic stand and the supernatant was removed without disturbing the beads. After removing supernatant, the lysed cells were added to the remaining beads and mixed for 5 minutes. After removing supernatant, magnetic beads were washed 2 times with 150 μl Wash Buffer A and mixed for 1 minute. Beads were captured again and supernatant removed. Beads were then washed with 150 μl Wash Buffer B, captured and supernatant was removed. Beads were next washed with 150 μl Elution Buffer, captured and supernatant removed. Beads were allowed to dry for 2 minutes. After drying, 50 μl of Elution Buffer was added and mixed for 5 minutes at 70° C. Beads were captured on magnet for 5 minutes. Forty μl of supernatant was removed and added to another 96 well plate.

cDNA Synthesis usingABI High Capacity cDNA Reverse Transcription Kit (Applied Biosystems, Foster City, Calif., Cat #4368813)

[0677] A master mix of 2 μl 10× Buffer, 0.8 μl 25×dNTPs, 2 μl Random primers, 1 μl Reverse Transcriptase, 1 μl RNase inhibitor and 3.2 μl of H₂O per reaction were added into 10 μl total RNA. cDNA was generated using a Bio-Rad C-1000 or S-1000 thermal cycler (Hercules, Calif.) through the following steps: 25° C. 10 min, 37° C. 120 min, 85° C. 5 sec, 4° C. hold.

Total RNA Isolation Using DYNABEADS mRNA Isolation Kit (Invitrogen™, Part #: 610-12)-384-Well Extraction

[0678] Cells were lysed in 50 μl of Lysis/Binding Buffer. Magenetic Dynabeads were washed in Lysis/Binding Buffer and resuspended in the same. 25 μl Lysis/Binding Buffer containing 2 μl of Dynabeads were then added per well. After shaking plates for 10 minutes at “7” on a Vibratranslator (UnionScientific), an automated plate washing system was utilized (Biotek EL406 with Biostacker, and magnetic capture plate). Plates were then washed in a manner similar to that described for the 96-well process: twice with buffer A (90 μl), once with buffer B (90 μl), and twice with buffer C (100 μl). The last wash was removed from the plate, and cDNA synthesis begun immediately.

cDNA Synthesis Using ABI High Capacity cDNA Reverse Transcription Kit (Applied Biosystems, Foster City, Calif., Cat #4368813)—384-Well Synthesis

[0679] A master mix of 2 μl 10× Buffer, 0.8 μl 25×dNTPs, 2 μl Random primers, 1 μl Reverse Transcriptase, 1 μl RNase inhibitor and 13.2 μl of H₂O per reaction were added to the wells of a 384-well plate containing only extracted RNA and magnetic beads (20 μl total volume). cDNA was generated by incubation at 25° C. for 10 min, 37° C. for 120 min, and 85° C. for 8 minutes.

### Real Time PCR:

[0680] Two μl of cDNA were added to a master mix containing 0.5 μl human GAPDH TaqMan Probe (Applied Biosystems Cat #4326317E) and 0.5 μl human AGT TaqMan probe (Applied Biosystems cat #Hs00174854 ml), 2 μL of nuclease-free water and 5 μl Lightcycler 480 probe master mix (Roche Cat #04887301001) per well in a 384 well plates (Roche cat #04887301001). qPCR was performed in a LightCycler 480 real-time PCR machine (Roche). To calculate relative fold change, data were analyzed using the ΔΔCt method and normalized to assays performed with cells transfected with 10 nM AD-1955, or mock transfected cells. IC₅₀s were calculated using a 4 parameter fit model using XLFit and normalized to cells transfected with AD-1955 or mock-transfected.

[0681] The sense and antisense sequences of AD-1955 are:

SENSE:
(SEQ ID NO: 13)
cuuAcGcuGAGuAcuucGAdTsdT
ANTISENSE:
(SEQ ID NO: 14)
UCGAAGuACUcAGCGuAAGdTsdT.

[0682] Table 5 shows the results of a single dose screen in Hep3B cells transfected using the 96-well method with the indicated 19mer AGT iRNAs. Data are expressed as percent of mRNA remaining relative to untreated cells.

[0683] Table 6 shows the dose response of Hep3B cells transfected using the 96-well method with the indicated 19mer AGT iRNAs. The indicated IC₅₀ values represent the IC₅₀ values relative to untreated cells.

[0684] Table 9 shows the results of a single dose screen in Hep3B cells transfected using the 384-well method with the indicated 21/23mer conjugate AGT iRNAs. Data are expressed as percent of mRNA remaining relative to untreated cells.

[0685] Table 10 shows the dose response of Hep3B cells transfected using the 384-well method with the indicated 21/23mer conjugate AGT iRNAs. The indicated IC₅₀ values represent the IC₅₀ values relative to untreated cells.

[0686] Table 12 shows the results of a single dose screen in Hep3B cells transfected using the 96-well method with the indicated 19mer AGT iRNAs. Data are expressed as percent of mRNA remaining relative to untreated cells.

[0687] Table 14 shows the results of a single dose, dose-response screen of hAGT knockdown with the indicated 21/23mer conjugate AGT iRNAs in mice infected with an AAV vector expressing hAGT.

[0688] Table 16 shows the results of a single dose, dose-response screen of hAGT knockdown with the indicated 21/23mer conjugate AGT iRNAs in mice infected with an AAV vector expressing hAGT.

TABLE 2
Abbreviations of nucleotide monomers used in nucleic acid sequence
representation. It will be understood that these monomers, when present in an
oligonucleotide are mutually linked by 5′-3′-phosphodiester bonds.

| Abbreviation | Nucleotide(s) |
|---|---|
| A | Adenosine-3’-phosphate |
| Af | 2’-fluoroadenosine-3’-phosphate |
| Afs | 2’-fluoroadenosine-3’-phosphorothioate |
| As | adenosine-3’-phosphorothioate |
| C | cytidine-3’-phosphate |
| Cf | 2’-fluorocytidine-3’-phosphate |
| Cfs | 2’-fluorocytidine-3’-phosphorothioate |
| Cs | cytidine-3’-phosphorothioate |
| G | guanosine-3’-phosphate |
| Gf | 2’-fluoroguanosine-3’-phosphate |
| Gfs | 2’-fluoroguanosine-3’-phosphorothioate |
| Gs | guanosine-3’-phosphorothioate |
| T | 5’-methyluridine-3’-phosphate |
| Tf | 2’-fluoro-5-methyluridine-3’-phosphate |
| Tfs | 2’-fluoro-5-methyluridine-3’-phosphorothioate |
| Ts | 5-methyluridine-3’-phosphorothioate |
| U | Uridine-3’-phosphate |
| Uf | 2’-fluorouridine-3’-phosphate |
| Ufs | 2’-fluorouridine-3’-phosphorothioate |
| Us | uridine-3’-phosphorothioate |
| N | any nucleotide (G, A, C, T or U) |
| a | 2′-O-methyladenosine-3’-phosphate |
| as | 2′-O-methyladenosine-3’-phosphorothioate |
| c | 2′-O-methylcytidine-3’-phosphate |
| cs | 2′-O-methylcytidine-3’-phosphorothioate |
| g | 2′-O-methylguanosine-3’-phosphate |
| gs | 2′-O-methylguanosine-3’-phosphorothioate |
| t | 2’-O-methyl-5-methyluridine-3’-phosphate |
| ts | 2’-O-methyl-5-methyluridine-3’-phosphorothioate |
| u | 2′-O-methyluridine-3’-phosphate |
| us | 2′-O-methyluridine-3’-phosphorothioate |
| s | phosphorothioate linkage |
| L96 | N-[tris(GalNAc-alkyl)-amidodecanoyl)]-4-hydroxyprolinol Hyp-(GalNAc- |
| | alkyl)3 |
| (dt) or dT | deoxy-thymine |
| dC | 2′-deoxycytidine-3′-phosphate |
| Y44 | inverted abasic DNA (2-hydroxymethyl-tetrahydrofurane-5-phosphate) |
| (Tgn) | Thymidine-glycol nucleic acid (GNA) S-Isomer |
| P | Phosphate |
| VP | Vinyl-phosphate |
| (Aam) | 2′-O-(N-methylacetamide)adenosine-3′-phosphate |
| (Aams) | 2′-O-(N-methylacetamide)adenosine-3′-phosphorothioate |
| (Tgn) | Thymidine-glycol nucleic acid (GNA) S-Isomer |
| (Cgn) | Cytidine-glycol nucleic acid (GNA) |

TABLE 3
Unmodified Sense and Antisense Strand Sequences of AGT dsRNAs (19mers)

| | Position | | | SEQ | | Position | | SEQ |
|---|---|---|---|---|---|---|---|---|
| | relative to | | | ID | Antisense | relative to | | ID |
| Duplex Name | NM_000029.3 | Sense Name | Sense Sequence | NO | Name | NM_000029.3 | Antisense Sequence | NO |
| UM AD-56041.1 | 485-503 | A-115161.1 | UUCUGGGUACUACAGCAGA | 15 | A-115162.1 | 485-503 | UCUGCUGUAGUACCCAGAA | 131 |
| UM AD-52431.1 | 491-509 | A-107992.1 | GUACUACAGCAGAAGGGUA | 16 | A-107993.1 | 491-509 | UACCCUUCUGCUGUAGUAC | 132 |
| UM AD-56057.1 | 606-624 | A-115229.1 | GUGACCGGGUGUACAUACA | 17 | A-115230.1 | 606-624 | UGUAUGUACACCCGGUCAC | 133 |
| UM AD-56047.1 | 635-653 | A-115163.1 | CUCGUCAUCCACAAUGAGA | 18 | A-115164.1 | 635-653 | UCUCAUUGUGGAUGACGAG | 134 |
| UM AD-52437.1 | 643-661 | A-107994.1 | CCACAAUGAGAGUACCUGU | 19 | A-107995.1 | 643-661 | ACAGGUACUCUCAUUGUGG | 135 |
| UM AD-56064.1 | 644-662 | A-115247.1 | CACAAUGAGAGUACCUGUG | 20 | A-115248.1 | 644-662 | CACAGGUACUCUCAUUGUG | 136 |
| UM AD-56021.1 | 658-676 | A-115123.1 | CUGUGAGCAGCUGGCAAAG | 21 | A-115124.1 | 658-676 | CUUUGCCAGCUGCUCACAG | 137 |
| UM AD-56067.1 | 741-759 | A-115201.1 | CUGUGGAUGAAAAGGCCCU | 22 | A-115202.1 | 741-759 | AGGGCCUUUUCAUCCACAG | 138 |
| UM AD-56030.1 | 822-840 | A-115173.1 | UGGUCGGGAUGCUGGCCAA | 23 | A-115174.1 | 822-840 | UUGGCCAGCAUCCCGACCA | 139 |
| UM AD-56034.1 | 825-843 | A-115237.1 | UCGGGAUGCUGGCCAACUU | 24 | A-115238.1 | 825-843 | AAGUUGGCCAGCAUCCCGA | 140 |
| UM AD-52443.1 | 828-846 | A-107996.1 | GGAUGCUGGCCAACUUCUU | 25 | A-107997.1 | 828-846 | AAGAAGUUGGCCAGCAUCC | 141 |
| UM AD-56017.1 | 834-852 | A-115153.1 | UGGCCAACUUCUUGGGCUU | 26 | A-115154.1 | 834-852 | AAGCCCAAGAAGUUGGCCA | 142 |
| UM AD-52449.1 | 841-859 | A-107998.1 | CUUCUUGGGCUUCCGUAUA | 27 | A-107999.1 | 841-859 | UAUACGGAAGCCCAAGAAG | 143 |
| UM AD-52455.1 | 844-862 | A-108000.1 | CUUGGGCUUCCGUAUAUAU | 28 | A-108001.1 | 844-862 | AUAUAUACGGAAGCCCAAG | 144 |
| UM AD-52461.1 | 849-867 | A-108002.1 | GCUUCCGUAUAUAUGGCAU | 29 | A-108003.1 | 849-867 | AUGCCAUAUAUACGGAAGC | 145 |
| UM AD-56025.1 | 855-873 | A-115187.1 | GUAUAUAUGGCAUGCACAG | 30 | A-115188.1 | 855-873 | CUGUGCAUGCCAUAUAUAC | 146 |
| UM AD-52467.1 | 863-881 | A-108004.1 | GGCAUGCACAGUGAGCUAU | 31 | A-108005.1 | 863-881 | AUAGCUCACUGUGCAUGCC | 147 |
| UM AD-56061.1 | 878-896 | A-115199.1 | CUAUGGGGCGUGGUCCAUG | 32 | A-115200.1 | 878-896 | CAUGGACCACGCCCCAUAG | 148 |
| UM AD-52473.1 | 910-928 | A-108006.1 | CUCCCCAACGGCUGUCUUU | 33 | A-108007.1 | 910-928 | AAAGACAGCCGUUGGGGAG | 149 |
| UM AD-56063.1 | 911-929 | A-115231.1 | UCCCCAACGGCUGUCUUUG | 34 | A-115232.1 | 911-929 | CAAAGACAGCCGUUGGGGA | 150 |
| UM AD-56046.1 | 1002-1020 | A-115241.1 | CUUGGAAGGACAAGAACUG | 35 | A-115242.1 | 1002-1020 | CAGUUCUUGUCCUUCCAAG | 151 |
| UM AD-52432.1 | 1214-1232 | A-108008.1 | CCACGCUCUCUGGACUUCA | 36 | A-108009.1 | 1214-1232 | UGAAGUCCAGAGAGCGUGG | 152 |
| UM AD-52438.1 | 1247-1265 | A-108010.1 | GCUGCUGAGAAGAUUGACA | 37 | A-108011.1 | 1247-1265 | UGUCAAUCUUCUCAGCAGC | 153 |
| UM AD-56059.1 | 1248-1266 | A-115167.1 | CUGCUGAGAAGAUUGACAG | 38 | A-115168.1 | 1248-1266 | CUGUCAAUCUUCUCAGCAG | 154 |
| UM AD-56016.1 | 1249-1267 | A-115137.1 | UGCUGAGAAGAUUGACAGG | 39 | A-115138.1 | 1249-1267 | CCUGUCAAUCUUCUCAGCA | 155 |
| UM AD-56068.1 | 1250-1268 | A-115217.1 | GCUGAGAAGAUUGACAGGU | 40 | A-115218.1 | 1250-1268 | ACCUGUCAAUCUUCUCAGC | 156 |
| UM AD-55989.1 | 1251-1269 | A-115081.1 | CUGAGAAGAUUGACAGGUU | 41 | A-115082.1 | 1251-1269 | AACCUGUCAAUCUUCUCAG | 157 |
| UM AD-56040.1 | 1260-1278 | A-115239.1 | UUGACAGGUUCAUGCAGGC | 42 | A-115240.1 | 1260-1278 | GCCUGCAUGAACCUGUCAA | 158 |
| UM AD-56069.1 | 1277-1295 | A-115233.1 | GCUGUGACAGGAUGGAAGA | 43 | A-115234.1 | 1277-1295 | UCUUCCAUCCUGUCACAGC | 159 |
| UM AD-52444.1 | 1403-1421 | A-108012.1 | GAGUUCUGGGUGGACAACA | 44 | A-108013.1 | 1403-1421 | UGUUGUCCACCCAGAACUC | 160 |
| UM AD-56033.1 | 1408-1426 | A-115221.1 | CUGGGUGGACAACAGCACC | 45 | A-115222.1 | 1408-1426 | GGUGCUGUUGUCCACCCAG | 161 |
| UM AD-56058.1 | 1413-1431 | A-115245.1 | UGGACAACAGCACCUCAGU | 46 | A-115246.1 | 1413-1431 | ACUGAGGUGCUGUUGUCCA | 162 |
| UM AD-52450.1 | 1417-1435 | A-108014.1 | CAACAGCACCUCAGUGUCU | 47 | A-108015.1 | 1417-1435 | AGACACUGAGGUGCUGUUG | 163 |
| UM AD-55981.1 | 1566-1584 | A-115141.1 | UGGACAAGGUGGAGGGUCU | 48 | A-115142.1 | 1566-1584 | AGACCCUCCACCUUGUCCA | 164 |
| UM AD-56032.1 | 1570-1588 | A-115205.1 | CAAGGUGGAGGGUCUCACU | 49 | A-115206.1 | 1570-1588 | AGUGAGACCCUCCACCUUG | 165 |
| UM AD-56066.1 | 1572-1590 | A-115185.1 | AGGUGGAGGGUCUCACUUU | 50 | A-115186.1 | 1572-1590 | AAAGUGAGACCCUCCACCU | 166 |
| UM AD-52456.1 | 1587-1605 | A-108016.1 | CUUUCCAGCAAAACUCCCU | 51 | A-108017.1 | 1587-1605 | AGGGAGUUUUGCUGGAAAG | 167 |
| UM AD-56054.1 | 1591-1609 | A-115181.1 | CCAGCAAAACUCCCUCAAC | 52 | A-115182.1 | 1591-1609 | GUUGAGGGAGUUUUGCUGG | 168 |
| UM AD-56035.1 | 1592-1610 | A-115159.1 | CAGCAAAACUCCCUCAACU | 53 | A-115160.1 | 1592-1610 | AGUUGAGGGAGUUUUGCUG | 169 |
| UM AD-52462.1 | 1595-1613 | A-108018.1 | CAAAACUCCCUCAACUGGA | 54 | A-108019.1 | 1595-1613 | UCCAGUUGAGGGAGUUUUG | 170 |
| UM AD-56026.1 | 1601-1619 | A-115203.1 | UCCCUCAACUGGAUGAAGA | 55 | A-115204.1 | 1601-1619 | UCUUCAUCCAGUUGAGGGA | 171 |
| UM AD-56022.1 | 1602-1620 | A-115139.1 | CCCUCAACUGGAUGAAGAA | 56 | A-115140.1 | 1602-1620 | UUCUUCAUCCAGUUGAGGG | 172 |
| UM AD-55983.1 | 1605-1623 | A-115079.1 | UCAACUGGAUGAAGAAACU | 57 | A-115080.1 | 1605-1623 | AGUUUCUUCAUCCAGUUGA | 173 |
| UM AD-56028.1 | 1728-1746 | A-115235.1 | CCGAGCUGAACCUGCAAAA | 58 | A-115236.1 | 1728-1746 | UUUUGCAGGUUCAGCUCGG | 174 |
| UM AD-55980.1 | 1729-1747 | A-115125.1 | CGAGCUGAACCUGCAAAAA | 59 | A-115126.1 | 1729-1747 | UUUUUGCAGGUUCAGCUCG | 175 |
| UM AD-56036.1 | 1735-1753 | A-115175.1 | GAACCUGCAAAAAUUGAGC | 60 | A-115176.1 | 1735-1753 | GCUCAAUUUUUGCAGGUUC | 176 |
| UM AD-56014.1 | 1737-1755 | A-115105.1 | ACCUGCAAAAAUUGAGCAA | 61 | A-115106.1 | 1737-1755 | UUGCUCAAUUUUUGCAGGU | 177 |
| UM AD-56007.1 | 1738-1756 | A-115087.1 | CCUGCAAAAAUUGAGCAAU | 62 | A-115088.1 | 1738-1756 | AUUGCUCAAUUUUUGCAGG | 178 |
| UM AD-56012.1 | 1739-1757 | A-115073.1 | CUGCAAAAAUUGAGCAAUG | 63 | A-115074.1 | 1739-1757 | CAUUGCUCAAUUUUUGCAG | 179 |
| UM AD-56055.1 | 1740-1758 | A-115197.1 | UGCAAAAAUUGAGCAAUGA | 64 | A-115198.1 | 1740-1758 | UCAUUGCUCAAUUUUUGCA | 180 |
| UM AD-56029.1 | 1741-1759 | A-115157.1 | GCAAAAAUUGAGCAAUGAC | 65 | A-115158.1 | 1741-1759 | GUCAUUGCUCAAUUUUUGC | 181 |
| UM AD-52469.1 | 1767-1785 | A-108036.1 | GGGUGGGGGAGGUGCUGAA | 66 | A-108037.1 | 1767-1785 | UUCAGCACCUCCCCCACCC | 182 |
| UM AD-56053.1 | 1810-1828 | A-115165.1 | GGAUGAGAGAGAGCCCACA | 67 | A-115166.1 | 1810-1828 | UGUGGGCUCUCUCUCAUCC | 183 |
| UM AD-52468.1 | 1879-1897 | A-108020.1 | CCGCCCAUUCCUGUUUGCU | 68 | A-108021.1 | 1879-1897 | AGCAAACAGGAAUGGGCGG | 184 |
| UM AD-56045.1 | 1885-1903 | A-115225.1 | AUUCCUGUUUGCUGUGUAU | 69 | A-115226.1 | 1885-1903 | AUACACAGCAAACAGGAAU | 185 |
| UM AD-56056.1 | 1887-1905 | A-115213.1 | UCCUGUUUGCUGUGUAUGA | 70 | A-115214.1 | 1887-1905 | UCAUACACAGCAAACAGGA | 186 |
| UM AD-56010.1 | 1891-1909 | A-115135.1 | GUUUGCUGUGUAUGAUCAA | 71 | A-115136.1 | 1891-1909 | UUGAUCAUACACAGCAAAC | 187 |
| UM AD-56015.1 | 1892-1910 | A-115121.1 | UUUGCUGUGUAUGAUCAAA | 72 | A-115122.1 | 1892-1910 | UUUGAUCAUACACAGCAAA | 188 |
| UM AD-56039.1 | 2070-2088 | A-115223.1 | CCCCCAGUCUCCCACCUUU | 73 | A-115224.1 | 2070-2088 | AAAGGUGGGAGACUGGGGG | 189 |
| UM AD-55991.1 | 2080-2098 | A-115113.1 | CCCACCUUUUCUUCUAAUG | 74 | A-115114.1 | 2080-2098 | CAUUAGAAGAAAAGGUGGG | 190 |
| UM AD-52474.1 | 2081-2099 | A-108022.1 | CCACCUUUUCUUCUAAUGA | 75 | A-108023.1 | 2081-2099 | UCAUUAGAAGAAAAGGUGG | 191 |
| UM AD-56024.1 | 2082-2100 | A-115171.1 | CACCUUUUCUUCUAAUGAG | 76 | A-115172.1 | 2082-2100 | CUCAUUAGAAGAAAAGGUG | 192 |
| UM AD-52433.1 | 2125-2143 | A-108024.1 | GUUUCUCCUUGGUCUAAGU | 77 | A-108025.1 | 2125-2143 | ACUUAGACCAAGGAGAAAC | 193 |
| UM AD-56037.1 | 2199-2217 | A-115191.1 | UUGCUGGGUUUAUUUUAGA | 78 | A-115192.1 | 2199-2217 | UCUAAAAUAAACCCAGCAA | 194 |
| UM AD-56049.1 | 2200-2218 | A-115195.1 | UGCUGGGUUUAUUUUAGAG | 79 | A-115196.1 | 2200-2218 | CUCUAAAAUAAACCCAGCA | 195 |
| UM AD-52439.1 | 2201-2219 | A-108026.1 | GCUGGGUUUAUUUUAGAGA | go | A-108027.1 | 2201-2219 | UCUCUAAAAUAAACCCAGC | 196 |
| UM AD-55978.1 | 2202-2220 | A-115093.1 | CUGGGUUUAUUUUAGAGAA | 81 | A-115094.1 | 2202-2220 | UUCUCUAAAAUAAACCCAG | 197 |
| UM AD-55999.1 | 2203-2221 | A-115147.1 | UGGGUUUAUUUUAGAGAAU | 82 | A-115148.1 | 2203-2221 | AUUCUCUAAAAUAAACCCA | 198 |
| UM AD-56050.1 | 2206-2224 | A-115211.1 | GUUUAUUUUAGAGAAUGGG | 83 | A-115212.1 | 2206-2224 | CCCAUUCUCUAAAAUAAAC | 199 |
| UM AD-56031.1 | 2209-2227 | A-115189.1 | UAUUUUAGAGAAUGGGGGU | 84 | A-115190.1 | 2209-2227 | ACCCCCAUUCUCUAAAAUA | 200 |
| UM AD-56027.1 | 2227-2245 | A-115219.1 | UGGGGAGGCAAGAACCAGU | 85 | A-115220.1 | 2227-2245 | ACUGGUUCUUGCCUCCCCA | 201 |
| UM AD-55987.1 | 2230-2248 | A-115143.1 | GGAGGCAAGAACCAGUGUU | 86 | A-115144.1 | 2230-2248 | AACACUGGUUCUUGCCUCC | 202 |
| UM AD-56043.1 | 2266-2284 | A-115193.1 | UCCAAAAAGAAUUCCAACC | 87 | A-115194.1 | 2266-2284 | GGUUGGAAUUCUUUUUGGA | 203 |
| UM AD-56001.1 | 2268-2286 | A-115085.1 | CAAAAAGAAUUCCAACCGA | 88 | A-115086.1 | 2268-2286 | UCGGUUGGAAUUCUUUUUG | 204 |
| UM AD-52445.1 | 2279-2297 | A-108028.1 | CCAACCGACCAGCUUGUUU | 89 | A-108029.1 | 2279-2297 | AAACAAGCUGGUCGGUUGG | 205 |
| UM AD-52451.1 | 2283-2301 | A-108030.1 | CCGACCAGCUUGUUUGUGA | 90 | A-108031.1 | 2283-2301 | UCACAAACAAGCUGGUCGG | 206 |
| UM AD-52457.1 | 2284-2302 | A-108032.1 | CGACCAGCUUGUUUGUGAA | 91 | A-108033.1 | 2284-2302 | UUCACAAACAAGCUGGUCG | 207 |
| UM AD-52463.1 | 2285-2303 | A-108034.1 | GACCAGCUUGUUUGUGAAA | 92 | A-108035.1 | 2285-2303 | UUUCACAAACAAGCUGGUC | 208 |
| UM AD-55982.1 | 2290-2308 | A-115063.1 | GCUUGUUUGUGAAACAAAA | 93 | A-115064.1 | 2290-2308 | UUUUGUUUCACAAACAAGC | 209 |
| UM AD-56019.1 | 2291-2309 | A-115091.1 | CUUGUUUGUGAAACAAAAA | 94 | A-115092.1 | 2291-2309 | UUUUUGUUUCACAAACAAG | 210 |
| UM AD-55988.1 | 2292-2310 | A-115065.1 | UUGUUUGUGAAACAAAAAA | 95 | A-115066.1 | 2292-2310 | UUUUUUGUUUCACAAACAA | 211 |
| UM AD-55994.1 | 2294-2312 | A-115067.1 | GUUUGUGAAACAAAAAAGU | 96 | A-115068.1 | 2294-2312 | ACUUUUUUGUUUCACAAAC | 212 |
| UM AD-56013.1 | 2296-2314 | A-115089.1 | UUGUGAAACAAAAAAGUGU | 97 | A-115090.1 | 2296-2314 | ACACUUUUUUGUUUCACAA | 213 |
| UM AD-56065.1 | 2299-2317 | A-115169.1 | UGAAACAAAAAAGUGUUCC | 98 | A-115170.1 | 2299-2317 | GGAACACUUUUUUGUUUCA | 214 |
| UM AD-56008.1 | 2304-2322 | A-115103.1 | CAAAAAAGUGUUCCCUUUU | 99 | A-115104.1 | 2304-2322 | AAAAGGGAACACUUUUUUG | 215 |
| UM AD-56048.1 | 2306-2324 | A-115179.1 | AAAAAGUGUUCCCUUUUCA | 100 | A-115180.1 | 2306-2324 | UGAAAAGGGAACACUUUUU | 216 |
| UM AD-56003.1 | 2307-2325 | A-115117.1 | AAAAGUGUUCCCUUUUCAA | 101 | A-115118.1 | 2307-2325 | UUGAAAAGGGAACACUUUU | 217 |
| UM AD-56051.1 | 2314-2332 | A-115227.1 | UUCCCUUUUCAAGUUGAGA | 102 | A-115228.1 | 2314-2332 | UCUCAACUUGAAAAGGGAA | 218 |
| UM AD-56044.1 | 2317-2335 | A-115209.1 | CCUUUUCAAGUUGAGAACA | 103 | A-115210.1 | 2317-2335 | UGUUCUCAACUUGAAAAGG | 219 |
| UM AD-55996.1 | 2320-2338 | A-115099.1 | UUUCAAGUUGAGAACAAAA | 104 | A-115100.1 | 2320-2338 | UUUUGUUCUCAACUUGAAA | 220 |
| UM AD-56002.1 | 2321-2339 | A-115101.1 | UUCAAGUUGAGAACAAAAA | 105 | A-115102.1 | 2321-2339 | UUUUUGUUCUCAACUUGAA | 221 |
| UM AD-55976.1 | 2323-2341 | A-115061.1 | CAAGUUGAGAACAAAAAUU | 106 | A-115062.1 | 2323-2341 | AAUUUUUGUUCUCAACUUG | 222 |
| UM AD-56062.1 | 2325-2343 | A-115215.1 | AGUUGAGAACAAAAAUUGG | 107 | A-115216.1 | 2325-2343 | CCAAUUUUUGUUCUCAACU | 223 |
| UM AD-56011.1 | 2326-2344 | A-115151.1 | GUUGAGAACAAAAAUUGGG | 108 | A-115152.1 | 2326-2344 | CCCAAUUUUUGUUCUCAAC | 224 |
| UM AD-56009.1 | 2328-2346 | A-115119.1 | UGAGAACAAAAAUUGGGUU | 109 | A-115120.1 | 2328-2346 | AACCCAAUUUUUGUUCUCA | 225 |
| UM AD-56020.1 | 2329-2347 | A-115107.1 | GAGAACAAAAAUUGGGUUU | 110 | A-115108.1 | 2329-2347 | AAACCCAAUUUUUGUUCUC | 226 |
| UM AD-55979.1 | 2331-2349 | A-115109.1 | GAACAAAAAUUGGGUUUUA | 111 | A-115110.1 | 2331-2349 | UAAAACCCAAUUUUUGUUC | 227 |
| UM AD-55997.1 | 2332-2350 | A-115115.1 | AACAAAAAUUGGGUUUUAA | 112 | A-115116.1 | 2332-2350 | UUAAAACCCAAUUUUUGUU | 228 |
| UM AD-56000.1 | 2333-2351 | A-115069.1 | ACAAAAAUUGGGUUUUAAA | 113 | A-115070.1 | 2333-2351 | UUUAAAACCCAAUUUUUGU | 229 |
| UM AD-56006.1 | 2334-2352 | A-115071.1 | CAAAAAUUGGGUUUUAAAA | 114 | A-115072.1 | 2334-2352 | UUUUAAAACCCAAUUUUUG | 230 |
| UM AD-55990.1 | 2339-2357 | A-115097.1 | AUUGGGUUUUAAAAUUAAA | 115 | A-115098.1 | 2339-2357 | UUUAAUUUUAAAACCCAAU | 231 |
| UM AD-55984.1 | 2340-2358 | A-115095.1 | UUGGGUUUUAAAAUUAAAG | 116 | A-115096.1 | 2340-2358 | CUUUAAUUUUAAAACCCAA | 232 |
| UM AD-55995.1 | 2341-2359 | A-115083.1 | UGGGUUUUAAAAUUAAAGU | 117 | A-115084.1 | 2341-2359 | ACUUUAAUUUUAAAACCCA | 233 |
| UM AD-56004.1 | 2346-2364 | A-115133.1 | UUUAAAAUUAAAGUAUACA | 118 | A-115134.1 | 2346-2364 | UGUAUACUUUAAUUUUAAA | 234 |
| UM AD-56042.1 | 2347-2365 | A-115177.1 | UUAAAAUUAAAGUAUACAU | 119 | A-115178.1 | 2347-2365 | AUGUAUACUUUAAUUUUAA | 235 |
| UM AD-55992.1 | 2384-2402 | A-115129.1 | UUGUAUUUAGUGUCUUGAA | 120 | A-115130.1 | 2384-2402 | UUCAAGACACUAAAUACAA | 236 |
| UM AD-55977.1 | 2385-2403 | A-115077.1 | UGUAUUUAGUGUCUUGAAU | 121 | A-115078.1 | 2385-2403 | AUUCAAGACACUAAAUACA | 237 |
| UM AD-56005.1 | 2391-2409 | A-115149.1 | UAGUGUCUUGAAUGUAAGA | 122 | A-115150.1 | 2391-2409 | UCUUACAUUCAAGACACUA | 238 |
| UM AD-56052.1 | 2397-2415 | A-115243.1 | CUUGAAUGUAAGAACAUGA | 123 | A-115244.1 | 2397-2415 | UCAUGUUCUUACAUUCAAG | 239 |
| UM AD-55985.1 | 2398-2416 | A-115111.1 | UUGAAUGUAAGAACAUGAC | 124 | A-115112.1 | 2398-2416 | GUCAUGUUCUUACAUUCAA | 240 |
| UM AD-56038.1 | 2439-2457 | A-115207.1 | CUUAGUUUUUUCCACAGAU | 125 | A-115208.1 | 2439-2457 | AUCUGUGGAAAAAACUAAG | 241 |
| UM AD-56023.1 | 2450-2468 | A-115155.1 | CCACAGAUGCUUGUGAUUU | 126 | A-115156.1 | 2450-2468 | AAAUCACAAGCAUCUGUGG | 242 |
| UM AD-56018.1 | 2452-2470 | A-115075.1 | ACAGAUGCUUGUGAUUUUU | 127 | A-115076.1 | 2452-2470 | AAAAAUCACAAGCAUCUGU | 243 |
| UM AD-56060.1 | 2497-2515 | A-115183.1 | CUGAAUUUCUGUUUGAAUG | 128 | A-115184.1 | 2497-2515 | CAUUCAAACAGAAAUUCAG | 244 |
| UM AD-55993.1 | 2519-2537 | A-115145.1 | AACCAUAGCUGGUUAUUUC | 129 | A-115146.1 | 2519-2537 | GAAAUAACCAGCUAUGGUU | 245 |
| UM AD-55986.1 | 2521-2539 | A-115127.1 | CCAUAGCUGGUUAUUUCUC | 130 | A-115128.1 | 2521-2539 | GAGAAAUAACCAGCUAUGG | 246 |

TABLE 4
Modified Sense and Antisense Strand Sequences of AGT dsRNAs (19 mers)

| | | | SEQ | Anti- | | SEQ |
|---|---|---|---|---|---|---|
| Duplex | Sense | | ID | sense | | ID |
| Name | Name | Sense Sequence | NO. | Name | Antisense Sequence | NO. |
| AD-56041.1 | A-115161.1 | uucuGGGuAcuAcAGcAGAdTsdT | 247 | A-115162.1 | UCUGCUGuAGuACCcAGAAdTsdT | 363 |
| AD-52431.1 | A-107992.1 | GuAcuAcAGcAGAAGGGuAdTsdT | 248 | A-107993.1 | uACCCUUCUGCUGuAGuACdTsdT | 364 |
| AD-56057.1 | A-115229.1 | GuGAccGGGuGuAcAuAcAdTsdT | 249 | A-115230.1 | UGuAUGuAcACCCGGUcACdTsdT | 365 |
| AD-56047.1 | A-115163.1 | cucGucAuccAcAAuGAGAdTsdT | 250 | A-115164.1 | UCUcAUUGUGGAUGACGAGdTsdT | 366 |
| AD-52437.1 | A-107994.1 | ccAcAAuGAGAGuAccuGudTsdT | 251 | A-107995.1 | AcAGGuACUCUcAUUGUGGdTsdT | 367 |
| AD-56064.1 | A-115247.1 | cAcAAuGAGAGuAccuGuGdTsdT | 252 | A-115248.1 | cAcAGGuACUCUcAUUGUGdTsdT | 368 |
| AD-56021.1 | A-115123.1 | cuGuGAGcAGcuGGcAAAGdTsdT | 253 | A-115124.1 | CUUUGCcAGCUGCUcAcAGdTsdT | 369 |
| AD-56067.1 | A-115201.1 | cuGuGGAuGAAAAGGcccudTsdT | 254 | A-115202.1 | AGGGCCUUUUcAUCcAcAGdTsdT | 370 |
| AD-56030.1 | A-115173.1 | uGGucGGGAuGcuGGccAAdTsdT | 255 | A-115174.1 | UUGGCcAGcAUCCCGACcAdTsdT | 371 |
| AD-56034.1 | A-115237.1 | ucGGGAuGcuGGccAAcuudTsdT | 256 | A-115238.1 | AAGUUGGCcAGcAUCCCGAdTsdT | 372 |
| AD-52443.1 | A-107996.1 | GGAuGcuGGccAAcuucuudTsdT | 257 | A-107997.1 | AAGAAGUUGGCcAGcAUCCdTsdT | 373 |
| AD-56017.1 | A-115153.1 | uGGccAAcuucuuGGGcuudTsdT | 258 | A-115154.1 | AAGCCcAAGAAGUUGGCcAdTsdT | 374 |
| AD-52449.1 | A-107998.1 | cuucuuGGGcuuccGuAuAdTsdT | 259 | A-107999.1 | uAuACGGAAGCCcAAGAAGdTsdT | 375 |
| AD-52455.1 | A-108000.1 | cuuGGGcuuccGuAuAuAudTsdT | 260 | A-108001.1 | AuAuAuACGGAAGCCcAAGdTsdT | 376 |
| AD-52461.1 | A-108002.1 | GcuuccGuAuAuAuGGcAudTsdT | 261 | A-108003.1 | AUGCcAuAuAuACGGAAGCdTsdT | 377 |
| AD-56025.1 | A-115187.1 | GuAuAuAuGGcAuGcAcAGdTsdT | 262 | A-115188.1 | CUGUGcAUGCcAuAuAuACdTsdT | 378 |
| AD-52467.1 | A-108004.1 | GGcAuGcAcAGuGAGcuAudTsdT | 263 | A-108005.1 | AuAGCUcACUGUGcAUGCCdTsdT | 379 |
| AD-56061.1 | A-115199.1 | cuAuGGGGcGuGGuccAuGdTsdT | 264 | A-115200.1 | cAUGGACcACGCCCcAuAGdTsdT | 380 |
| AD-52473.1 | A-108006.1 | cuccccAAcGGcuGucuuudTsdT | 265 | A-108007.1 | AAAGAcAGCCGUUGGGGAGdTsdT | 381 |
| AD-56063.1 | A-115231.1 | uccccAAcGGcuGucuuuGdTsdT | 266 | A-115232.1 | cAAAGAcAGCCGUUGGGGAdTsdT | 382 |
| AD-56046.1 | A-115241.1 | cuuGGAAGGAcAAGAAcuGdTsdT | 267 | A-115242.1 | cAGUUCUUGUCCUUCcAAGdTsdT | 383 |
| AD-52432.1 | A-108008.1 | ccAcGcucucuGGAcuucAdTsdT | 268 | A-108009.1 | UGAAGUCcAGAGAGCGUGGdTsdT | 384 |
| AD-52438.1 | A-108010.1 | GcuGcuGAGAAGAuuGAcAdTsdT | 269 | A-108011.1 | UGUcAAUCUUCUcAGcAGCdTsdT | 385 |
| AD-56059.1 | A-115167.1 | cuGcuGAGAAGAuuGAcAGdTsdT | 270 | A-115168.1 | CUGUcAAUCUUCUcAGcAGdTsdT | 386 |
| AD-56016.1 | A-115137.1 | uGcuGAGAAGAuuGAcAGGdTsdT | 271 | A-115138.1 | CCUGUcAAUCUUCUcAGcAdTsdT | 387 |
| AD-56068.1 | A-115217.1 | GcuGAGAAGAuuGAcAGGudTsdT | 272 | A-115218.1 | ACCUGUcAAUCUUCUcAGCdTsdT | 388 |
| AD-55989.1 | A-115081.1 | cuGAGAAGAuuGAcAGGuudTsdT | 273 | A-115082.1 | AACCUGUcAAUCUUCUcAGdTsdT | 389 |
| AD-56040.1 | A-115239.1 | uuGAcAGGuucAuGcAGGcdTsdT | 274 | A-115240.1 | GCCUGcAUGAACCUGUcAAdTsdT | 390 |
| AD-56069.1 | A-115233.1 | GcuGuGAcAGGAuGGAAGAdTsdT | 275 | A-115234.1 | UCUUCcAUCCUGUcAcAGCdTsdT | 391 |
| AD-52444.1 | A-108012.1 | GAGuucuGGGuGGAcAAcAdTsdT | 276 | A-108013.1 | UGUUGUCcACCcAGAACUCdTsdT | 392 |
| AD-56033.1 | A-115221.1 | cuGGGuGGAcAAcAGcAccdTsdT | 277 | A-115222.1 | GGUGCUGUUGUCcACCcAGdTsdT | 393 |
| AD-56058.1 | A-115245.1 | uGGAcAAcAGcAccucAGudTsdT | 278 | A-115246.1 | ACUGAGGUGCUGUUGUCcAdTsdT | 394 |
| AD-52450.1 | A-108014.1 | cAAcAGcAccucAGuGucudTsdT | 279 | A-108015.1 | AGAcACUGAGGUGCUGUUGdTsdT | 395 |
| AD-55981.1 | A-115141.1 | uGGAcAAGGuGGAGGGucudTsdT | 280 | A-115142.1 | AGACCCUCcACCUUGUCcAdTsdT | 396 |
| AD-56032.1 | A-115205.1 | cAAGGuGGAGGGucucAcudTsdT | 281 | A-115206.1 | AGUGAGACCCUCcACCUUGdTsdT | 397 |
| AD-56066.1 | A-115185.1 | AGGuGGAGGGucucAcuuudTsdT | 282 | A-115186.1 | AAAGUGAGACCCUCcACCUdTsdT | 398 |
| AD-52456.1 | A-108016.1 | cuuuccAGcAAAAcucccudTsdT | 283 | A-108017.1 | AGGGAGUUUUGCUGGAAAGdTsdT | 399 |
| AD-56054.1 | A-115181.1 | ccAGcAAAAcucccucAAcdTsdT | 284 | A-115182.1 | GUUGAGGGAGUUUUGCUGGdTsdT | 400 |
| AD-56035.1 | A-115159.1 | cAGcAAAAcucccucAAcudTsdT | 285 | A-115160.1 | AGUUGAGGGAGUUUUGCUGdTsdT | 401 |
| AD-52462.1 | A-108018.1 | cAAAAcucccucAAcuGGAdTsdT | 286 | A-108019.1 | UCcAGUUGAGGGAGUUUUGdTsdT | 402 |
| AD-56026.1 | A-115203.1 | ucccucAAcuGGAuGAAGAdTsdT | 287 | A-115204.1 | UCUUcAUCcAGUUGAGGGAdTsdT | 403 |
| AD-56022.1 | A-115139.1 | cccucAAcuGGAuGAAGAAdTsdT | 288 | A-115140.1 | UUCUUcAUCcAGUUGAGGGdTsdT | 404 |
| AD-55983.1 | A-115079.1 | ucAAcuGGAuGAAGAAAcudTsdT | 289 | A-115080.1 | AGUUUCUUcAUCcAGUUGAdTsdT | 405 |
| AD-56028.1 | A-115235.1 | ccGAGcuGAAccuGcAAAAdTsdT | 290 | A-115236.1 | UUUUGcAGGUUcAGCUCGGdTsdT | 406 |
| AD-55980.1 | A-115125.1 | cGAGcuGAAccuGcAAAAAdTsdT | 291 | A-115126.1 | UUUUUGcAGGUUcAGCUCGdTsdT | 407 |
| AD-56036.1 | A-115175.1 | GAAccuGcAAAAAuuGAGcdTsdT | 292 | A-115176.1 | GCUcAAUUUUUGcAGGUUCdTsdT | 408 |
| AD-56014.1 | A-115105.1 | AccuGcAAAAAuuGAGcAAdTsdT | 293 | A-115106.1 | UUGCUcAAUUUUUGcAGGUdTsdT | 409 |
| AD-56007.1 | A-115087.1 | ccuGcAAAAAuuGAGcAAudTsdT | 294 | A-115088.1 | AUUGCUcAAUUUUUGcAGGdTsdT | 410 |
| AD-56012.1 | A-115073.1 | cuGcAAAAAuuGAGcAAuGdTsdT | 295 | A-115074.1 | cAUUGCUcAAUUUUUGcAGdTsdT | 411 |
| AD-56055.1 | A-115197.1 | uGcAAAAAuuGAGcAAuGAdTsdT | 296 | A-115198.1 | UcAUUGCUcAAUUUUUGcAdTsdT | 412 |
| AD-56029.1 | A-115157.1 | GcAAAAAuuGAGcAAuGAcdTsdT | 297 | A-115158.1 | GUcAUUGCUcAAUUUUUGCdTsdT | 413 |
| AD-52469.1 | A-108036.1 | GGGuGGGGGAGGuGcuGAAdTsdT | 298 | A-108037.1 | UUcAGcACCUCCCCcACCCdTsdT | 414 |
| AD-56053.1 | A-115165.1 | GGAuGAGAGAGAGcccAcAdTsdT | 299 | A-115166.1 | UGUGGGCUCUCUCUcAUCCdTsdT | 415 |
| AD-52468.1 | A-108020.1 | ccGcccAuuccuGuuuGcudTsdT | 300 | A-108021.1 | AGcAAAcAGGAAUGGGCGGdTsdT | 416 |
| AD-56045.1 | A-115225.1 | AuuccuGuuuGcuGuGuAudTsdT | 301 | A-115226.1 | AuAcAcAGcAAAcAGGAAUdTsdT | 417 |
| AD-56056.1 | A-115213.1 | uccuGuuuGcuGuGuAuGAdTsdT | 302 | A-115214.1 | UcAuAcAcAGcAAAcAGGAdTsdT | 418 |
| AD-56010.1 | A-115135.1 | GuuuGcuGuGuAuGAucAAdTsdT | 303 | A-115136.1 | UUGAUcAuAcAcAGcAAACdTsdT | 419 |
| AD-56015.1 | A-115121.1 | uuuGcuGuGuAuGAucAAAdTsdT | 304 | A-115122.1 | UUUGAUcAuAcAcAGcAAAdTsdT | 420 |
| AD-56039.1 | A-115223.1 | cccccAGucucccAccuuudTsdT | 305 | A-115224.1 | AAAGGUGGGAGACUGGGGGdTsdT | 421 |
| AD-55991.1 | A-115113.1 | cccAccuuuucuucuAAuGdTsdT | 306 | A-115114.1 | cAUuAGAAGAAAAGGUGGGdTsdT | 422 |
| AD-52474.1 | A-108022.1 | ccAccuuuucuucuAAuGAdTsdT | 307 | A-108023.1 | UcAUuAGAAGAAAAGGUGGdTsdT | 423 |
| AD-56024.1 | A-115171.1 | cAccuuuucuucuAAuGAGdTsdT | 308 | A-115172.1 | CUcAUuAGAAGAAAAGGUGdTsdT | 424 |
| AD-52433.1 | A-108024.1 | GuuucuccuuGGucuAAGudTsdT | 309 | A-108025.1 | ACUuAGACcAAGGAGAAACdTsdT | 425 |
| AD-56037.1 | A-115191.1 | uuGcuGGGuuuAuuuuAGAdTsdT | 310 | A-115192.1 | UCuAAAAuAAACCcAGcAAdTsdT | 426 |
| AD-56049.1 | A-115195.1 | uGcuGGGuuuAuuuuAGAGdTsdT | 311 | A-115196.1 | CUCuAAAAuAAACCcAGcAdTsdT | 427 |
| AD-52439.1 | A-108026.1 | GcuGGGuuuAuuuuAGAGAdTsdT | 312 | A-108027.1 | UCUCuAAAAuAAACCcAGCdTsdT | 428 |
| AD-55978.1 | A-115093.1 | cuGGGuuuAuuuuAGAGAAdTsdT | 313 | A-115094.1 | UUCUCuAAAAuAAACCcAGdTsdT | 429 |
| AD-55999.1 | A-115147.1 | uGGGuuuAuuuuAGAGAAudTsdT | 314 | A-115148.1 | AUUCUCuAAAAuAAACCcAdTsdT | 430 |
| AD-56050.1 | A-115211.1 | GuuuAuuuuAGAGAAuGGGdTsdT | 315 | A-115212.1 | CCcAUUCUCuAAAAuAAACdTsdT | 431 |
| AD-56031.1 | A-115189.1 | uAuuuuAGAGAAuGGGGGudTsdT | 316 | A-115190.1 | ACCCCcAUUCUCuAAAAuAdTsdT | 432 |
| AD-56027.1 | A-115219.1 | uGGGGAGGcAAGAAccAGudTsdT | 317 | A-115220.1 | ACUGGUUCUUGCCUCCCcAdTsdT | 433 |
| AD-55987.1 | A-115143.1 | GGAGGcAAGAAccAGuGuudTsdT | 318 | A-115144.1 | AAcACUGGUUCUUGCCUCCdTsdT | 434 |
| AD-56043.1 | A-115193.1 | uccAAAAAGAAuuccAAccdTsdT | 319 | A-115194.1 | GGUUGGAAUUCUUUUUGGAdTsdT | 435 |
| AD-56001.1 | A-115085.1 | cAAAAAGAAuuccAAccGAdTsdT | 320 | A-115086.1 | UCGGUUGGAAUUCUUUUUGdTsdT | 436 |
| AD-52445.1 | A-108028.1 | ccAAccGAccAGcuuGuuudTsdT | 321 | A-108029.1 | AAAcAAGCUGGUCGGUUGGdTsdT | 437 |
| AD-52451.1 | A-108030.1 | ccGAccAGcuuGuuuGuGAdTsdT | 322 | A-108031.1 | UcAcAAAcAAGCUGGUCGGdTsdT | 438 |
| AD-52457.1 | A-108032.1 | cGAccAGcuuGuuuGuGAAdTsdT | 323 | A-108033.1 | UUcAcAAAcAAGCUGGUCGdTsdT | 439 |
| AD-52463.1 | A-108034.1 | GAccAGcuuGuuuGuGAAAdTsdT | 324 | A-108035.1 | UUUcAcAAAcAAGCUGGUCdTsdT | 440 |
| AD-55982.1 | A-115063.1 | GcuuGuuuGuGAAAcAAAAdTsdT | 325 | A-115064.1 | UUUUGUUUcAcAAAcAAGCdTsdT | 441 |
| AD-56019.1 | A-115091.1 | cuuGuuuGuGAAAcAAAAAdTsdT | 326 | A-115092.1 | UUUUUGUUUcAcAAAcAAGdTsdT | 442 |
| AD-55988.1 | A-115065.1 | uuGuuuGuGAAAcAAAAAAdTsdT | 327 | A-115066.1 | UUUUUUGUUUcAcAAAcAAdTsdT | 443 |
| AD-55994.1 | A-115067.1 | GuuuGuGAAAcAAAAAAGudTsdT | 328 | A-115068.1 | ACUUUUUUGUUUcAcAAACdTsdT | 444 |
| AD-56013.1 | A-115089.1 | uuGuGAAAcAAAAAAGuGudTsdT | 329 | A-115090.1 | AcACUUUUUUGUUUcAcAAdTsdT | 445 |
| AD-56065.1 | A-115169.1 | uGAAAcAAAAAAGuGuuccdTsdT | 330 | A-115170.1 | GGAAcACUUUUUUGUUUcAdTsdT | 446 |
| AD-56008.1 | A-115103.1 | cAAAAAAGuGuucccuuuudTsdT | 331 | A-115104.1 | AAAAGGGAAcACUUUUUUGdTsdT | 447 |
| AD-56048.1 | A-115179.1 | AAAAAGuGuucccuuuucAdTsdT | 332 | A-115180.1 | UGAAAAGGGAAcACUUUUUdTsdT | 448 |
| AD-56003.1 | A-115117.1 | AAAAGuGuucccuuuucAAdTsdT | 333 | A-115118.1 | UUGAAAAGGGAAcACUUUUdTsdT | 449 |
| AD-56051.1 | A-115227.1 | uucccuuuucAAGuuGAGAdTsdT | 334 | A-115228.1 | UCUcAACUUGAAAAGGGAAdTsdT | 459 |
| AD-56044.1 | A-115209.1 | ccuuuucAAGuuGAGAAcAdTsdT | 335 | A-115210.1 | UGUUCUcAACUUGAAAAGGdTsdT | 451 |
| AD-55996.1 | A-115099.1 | uuucAAGuuGAGAAcAAAAdTsdT | 336 | A-115100.1 | UUUUGUUCUcAACUUGAAAdTsdT | 452 |
| AD-56002.1 | A-115101.1 | uucAAGuuGAGAAcAAAAAdTsdT | 337 | A-115102.1 | UUUUUGUUCUcAACUUGAAdTsdT | 453 |
| AD-55976.1 | A-115061.1 | cAAGuuGAGAAcAAAAAuudTsdT | 338 | A-115062.1 | AAUUUUUGUUCUcAACUUGdTsdT | 454 |
| AD-56062.1 | A-115215.1 | AGuuGAGAAcAAAAAuuGGdTsdT | 339 | A-115216.1 | CcAAUUUUUGUUCUcAACUdTsdT | 455 |
| AD-56011.1 | A-115151.1 | GuuGAGAAcAAAAAuuGGGdTsdT | 340 | A-115152.1 | CCcAAUUUUUGUUCUcAACdTsdT | 456 |
| AD-56009.1 | A-115119.1 | uGAGAAcAAAAAuuGGGuudTsdT | 341 | A-115120.1 | AACCcAAUUUUUGUUCUcAdTsdT | 457 |
| AD-56020.1 | A-115107.1 | GAGAAcAAAAAuuGGGuuudTsdT | 342 | A-115108.1 | AAACCcAAUUUUUGUUCUCdTsdT | 458 |
| AD-55979.1 | A-115109.1 | GAAcAAAAAuuGGGuuuuAdTsdT | 343 | A-115110.1 | uAAAACCcAAUUUUUGUUCdTsdT | 459 |
| AD-55997.1 | A-115115.1 | AAcAAAAAuuGGGuuuuAAdTsdT | 344 | A-115116.1 | UuAAAACCcAAUUUUUGUUdTsdT | 460 |
| AD-56000.1 | A-115069.1 | AcAAAAAuuGGGuuuuAAAdTsdT | 345 | A-115070.1 | UUuAAAACCcAAUUUUUGUdTsdT | 461 |
| AD-56006.1 | A-115071.1 | cAAAAAuuGGGuuuuAAAAdTsdT | 346 | A-115072.1 | UUUuAAAACCcAAUUUUUGdTsdT | 462 |
| AD-55990.1 | A-115097.1 | AuuGGGuuuuAAAAuuAAAdTsdT | 347 | A-115098.1 | UUuAAUUUuAAAACCcAAUdTsdT | 463 |
| AD-55984.1 | A-115095.1 | uuGGGuuuuAAAAuuAAAGdTsdT | 348 | A-115096.1 | CUUuAAUUUuAAAACCcAAdTsdT | 464 |
| AD-55995.1 | A-115083.1 | uGGGuuuuAAAAuuAAAGudTsdT | 349 | A-115084.1 | ACUUuAAUUUuAAAACCcAdTsdT | 465 |
| AD-56004.1 | A-115133.1 | uuuAAAAuuAAAGuAuAcAdTsdT | 350 | A-115134.1 | UGuAuACUUuAAUUUuAAAdTsdT | 466 |
| AD-56042.1 | A-115177.1 | uuAAAAuuAAAGuAuAcAudTsdT | 351 | A-115178.1 | AUGuAuACUUuAAUUUuAAdTsdT | 467 |
| AD-55992.1 | A-115129.1 | uuGuAuuuAGuGucuuGAAdTsdT | 352 | A-115130.1 | UUcAAGAcACuAAAuAcAAdTsdT | 468 |
| AD-55977.1 | A-115077.1 | uGuAuuuAGuGucuuGAAudTsdT | 353 | A-115078.1 | AUUcAAGAcACuAAAuAcAdTsdT | 469 |
| AD-56005.1 | A-115149.1 | uAGuGucuuGAAuGuAAGAdTsdT | 354 | A-115150.1 | UCUuAcAUUcAAGAcACuAdTsdT | 470 |
| AD-56052.1 | A-115243.1 | cuuGAAuGuAAGAAcAuGAdTsdT | 355 | A-115244.1 | UcAUGUUCUuAcAUUcAAGdTsdT | 471 |
| AD-55985.1 | A-115111.1 | uuGAAuGuAAGAAcAuGAcdTsdT | 356 | A-115112.1 | GUcAUGUUCUuAcAUUcAAdTsdT | 472 |
| AD-56038.1 | A-115207.1 | cuuAGuuuuuuccAcAGAudTsdT | 357 | A-115208.1 | AUCUGUGGAAAAAACuAAGdTsdT | 473 |
| AD-56023.1 | A-115155.1 | ccAcAGAuGcuuGuGAuuudTsdT | 358 | A-115156.1 | AAAUcAcAAGcAUCUGUGGdTsdT | 474 |
| AD-56018.1 | A-115075.1 | AcAGAuGcuuGuGAuuuuudTsdT | 359 | A-115076.1 | AAAAAUcAcAAGcAUCUGUdTsdT | 475 |
| AD-56060.1 | A-115183.1 | cuGAAuuucuGuuuGAAuGdTsdT | 360 | A-115184.1 | cAUUcAAAcAGAAAUUcAGdTsdT | 476 |
| AD-55993.1 | A-115145.1 | AAccAuAGcuGGuuAuuucdTsdT | 361 | A-115146.1 | GAAAuAACcAGCuAUGGUUdTsdT | 477 |
| AD-55986.1 | A-115127.1 | ccAuAGcuGGuuAuuucucdTsdT | 362 | A-115128.1 | GAGAAAuAACcAGCuAUGGdTsdT | 478 |

TABLE 5
AGT single dose screen in Hep3B cells

| | | | | | | | Start relative |
|---|---|---|---|---|---|---|---|
| | 10 nM | | 0.1 nM | 0.1 nM | 0.01 nM | 0.01 nM | to |
| | Avg | 10 nM SD | Avg | SD | Avg | SD | NM_000029.3 |
| AD-52457.1 | 9.4 | 0.6 | 13.3 | 1.3 | 15.1 | 2.3 | 2284 |
| AD-52438.1 | 3.4 | 0.1 | 12.2 | 1.8 | 17.7 | 1.7 | 1247 |
| AD-52463.1 | 9.8 | 0.9 | 16.9 | 2.9 | 19.3 | 2.1 | 2285 |
| AD-52433.1 | 7.4 | 1.5 | 14.4 | 1.0 | 24.8 | 1.3 | 2125 |
| AD-52439.1 | 15.1 | 1.1 | 23.9 | 0.2 | 29.9 | 1.4 | 2201 |
| AD-52449.1 | 5.7 | 0.6 | 22.7 | 1.2 | 42.4 | 5.3 | 841 |
| AD-52451.1 | 10.4 | 0.5 | 29.0 | 1.1 | 47.4 | 1.1 | 2283 |
| AD-52474.1 | 5.0 | 0.3 | 30.6 | 2.2 | 49.1 | 1.9 | 2081 |
| AD-52462.1 | 6.1 | 0.1 | 23.7 | 2.7 | 50.8 | 1.6 | 1595 |
| AD-52445.1 | 11.0 | 0.3 | 24.2 | 1.4 | 55.1 | 0.4 | 2279 |
| AD-52456.1 | 11.9 | 0.3 | 38.7 | 0.5 | 71.7 | 1.4 | 1587 |
| AD-52469.1 | 15.9 | 0.6 | 40.6 | 3.1 | 84.1 | 0.8 | 1767 |
| AD-52461.1 | 62.8 | 1.1 | 78.5 | 0.3 | 85.0 | 0.6 | 849 |
| AD-52443.1 | 16.9 | 0.0 | 49.4 | 2.0 | 88.4 | 3.0 | 828 |
| AD-52468.1 | 27.6 | 1.5 | 85.1 | 3.7 | 91.6 | 1.4 | 1879 |
| AD-52431.1 | 24.6 | 3.7 | 75.2 | 1.8 | 92.3 | 3.1 | 491 |
| AD-52444.1 | 67.0 | 2.8 | 74.4 | 0.3 | 94.1 | 0.2 | 1403 |
| AD-52455.1 | 57.0 | 0.5 | 89.5 | 4.1 | 94.4 | 1.6 | 844 |
| AD-52432.1 | 70.6 | 2.3 | 93.6 | 8.2 | 95.7 | 3.7 | 1214 |
| AD-52473.1 | 46.4 | 0.2 | 75.6 | 0.2 | 95.8 | 0.1 | 910 |
| AD-52450.1 | 20.3 | 1.7 | 53.0 | 2.5 | 96.3 | 4.8 | 1417 |
| AD-52437.1 | 36.3 | 4.1 | 86.6 | 0.6 | 96.6 | 0.9 | 643 |
| AD-52467.1 | 59.5 | 0.8 | 94.5 | 1.7 | 102.9 | 5.1 | 863 |
| AD-55976.1 | | | 3.6 | 5.8 | | | 2323 |
| AD-55977.1 | | | 77.2 | 70.0 | | | 2385 |
| AD-55978.1 | | | 8.3 | 11.8 | | | 2202 |
| AD-55979.1 | | | 7.7 | 9.1 | | | 2331 |
| AD-55980.1 | | | 14.1 | 17.4 | | | 1729 |
| AD-55981.1 | | | 21.2 | 29.4 | | | 1566 |
| AD-56023.1 | | | 74.1 | 77.1 | | | 2450 |
| AD-56024.1 | | | 17.6 | 27.8 | | | 2082 |
| AD-56025.1 | | | 66.5 | 75.0 | | | 855 |
| AD-56026.1 | | | 13.7 | 20.2 | | | 1601 |
| AD-56027.1 | | | 16.9 | 22.2 | | | 2227 |
| AD-56028.1 | | | 63.8 | 74.0 | | | 1728 |
| AD-55982.1 | | | 22.9 | 26.1 | | | 2290 |
| AD-55983.1 | | | 6.2 | 8.7 | | | 1605 |
| AD-55984.1 | | | 52.0 | 59.9 | | | 2340 |
| AD-55985.1 | | | 70.1 | 65.1 | | | 2398 |
| AD-55986.1 | | | 80.5 | 79.3 | | | 2521 |
| AD-55987.1 | | | 12.5 | 15.5 | | | 2230 |
| AD-56029.1 | | | 51.3 | 62.2 | | | 1741 |
| AD-56030.1 | | | 53.3 | 58.0 | | | 822 |
| AD-56031.1 | | | 38.1 | 43.7 | | | 2204 |
| AD-56032.1 | | | 12.6 | 15.3 | | | 1570 |
| AD-56033.1 | | | 99.8 | 100.7 | | | 1408 |
| AD-56034.1 | | | 87.8 | 93.0 | | | 825 |
| AD-55988.1 | | | 46.4 | 49.5 | | | 2292 |
| AD-55989.1 | | | 5.8 | 9.7 | | | 1251 |
| AD-55990.1 | | | 6.5 | 5.0 | | | 2339 |
| AD-55991.1 | | | 50.4 | 38.2 | | | 2080 |
| AD-55992.1 | | | 76.4 | 60.5 | | | 2384 |
| AD-55993.1 | | | 66.5 | 62.9 | | | 2519 |
| AD-56035.1 | | | 17.9 | 17.6 | | | 1592 |
| AD-56036.1 | | | 47.7 | 59.9 | | | 1735 |
| AD-56037.1 | | | 80.8 | 83.5 | | | 2199 |
| AD-56038.1 | | | 84.8 | 90.4 | | | 2439 |
| AD-56039.1 | | | 47.9 | 66.7 | | | 2070 |
| AD-56040.1 | | | 95.0 | 98.3 | | | 1260 |
| AD-55994.1 | | | 3.6 | 5.5 | | | 2294 |
| AD-55995.1 | | | 31.4 | 47.8 | | | 2341 |
| AD-55996.1 | | | 5.1 | 5.0 | | | 2320 |
| AD-55997.1 | | | 83.3 | 76.6 | | | 2332 |
| AD-55999.1 | | | 74.6 | 75.0 | | | 2203 |
| AD-56041.1 | | | 21.9 | 21.4 | | | 485 |
| AD-56042.1 | | | 73.3 | 73.5 | | | 2347 |
| AD-56043.1 | | | 53.1 | 57.8 | | | 2266 |
| AD-56044.1 | | | 12.0 | 13.9 | | | 2317 |
| AD-56045.1 | | | 41.7 | 48.8 | | | 1885 |
| AD-56046.1 | | | 83.0 | 90.1 | | | 1002 |
| AD-56000.1 | | | 13.3 | 20.3 | | | 2333 |
| AD-56001.1 | | | 4.7 | 5.7 | | | 2268 |
| AD-56002.1 | | | 5.4 | 6.6 | | | 2321 |
| AD-56003.1 | | | 4.2 | 4.4 | | | 2307 |
| AD-56004.1 | | | 54.0 | 68.5 | | | 2346 |
| AD-56005.1 | | | 60.2 | 62.2 | | | 2391 |
| AD-56047.1 | | | 24.7 | 28.2 | | | 635 |
| AD-56048.1 | | | 7.1 | 7.4 | | | 2306 |
| AD-56049.1 | | | 73.0 | 62.6 | | | 2200 |
| AD-56050.1 | | | 96.4 | 102.1 | | | 2206 |
| AD-56051.1 | | | 17.4 | 23.0 | | | 2314 |
| AD-56052.1 | | | 85.1 | 102.5 | | | 2397 |
| AD-56006.1 | | | 8.1 | 10.7 | | | 2334 |
| AD-56007.1 | | | 17.8 | 19.1 | | | 1738 |
| AD-56008.1 | | | 5.4 | 4.8 | | | 2304 |
| AD-56009.1 | | | 12.2 | 14.4 | | | 2328 |
| AD-56010.1 | | | 62.1 | 69.0 | | | 1891 |
| AD-56011.1 | | | 35.3 | 40.3 | | | 2326 |
| AD-56053.1 | | | 5.0 | 6.7 | | | 1810 |
| AD-56054.1 | | | 30.9 | 35.5 | | | 1591 |
| AD-56055.1 | | | 61.4 | 50.9 | | | 1740 |
| AD-56056.1 | | | 83.6 | 94.0 | | | 1887 |
| AD-56057.1 | | | 85.7 | 97.9 | | | 606 |
| AD-56058.1 | | | 68.6 | 87.4 | | | 1413 |
| AD-56012.1 | | | 35.0 | 47.1 | | | 1739 |
| AD-56013.1 | | | 49.2 | 57.6 | | | 2296 |
| AD-56014.1 | | | 54.4 | 60.3 | | | 1737 |
| AD-56015.1 | | | 42.2 | 46.7 | | | 1892 |
| AD-56016.1 | | | 11.2 | 15.6 | | | 1249 |
| AD-56017.1 | | | 10.6 | 12.9 | | | 834 |
| AD-56059.1 | | | 37.3 | 45.2 | | | 1248 |
| AD-56060.1 | | | 94.1 | 94.3 | | | 2497 |
| AD-56061.1 | | | 99.8 | 94.6 | | | 878 |
| AD-56062.1 | | | 19.2 | 32.2 | | | 2325 |
| AD-56063.1 | | | 102.2 | 102.8 | | | 911 |
| AD-56064.1 | | | 80.2 | 92.3 | | | 644 |
| AD-56018.1 | | | 72.0 | 74.5 | | | 2452 |
| AD-56019.1 | | | 25.2 | 27.7 | | | 2291 |
| AD-56020.1 | | | 10.2 | 15.3 | | | 2329 |
| AD-56021.1 | | | 36.0 | 40.9 | | | 658 |
| AD-56022.1 | | | 37.5 | 52.7 | | | 1602 |
| AD-56065.1 | | | 56.5 | 71.9 | | | 2299 |
| AD-56066.1 | | | 12.3 | 18.9 | | | 1572 |
| AD-56067.1 | | | 64.9 | 81.8 | | | 741 |
| AD-56068.1 | | | 68.6 | 82.1 | | | 1250 |
| AD-56069.1 | | | 48.9 | 72.7 | | | 1277 |

TABLE 6
AGT IC₅₀ data in Hep3B Cells

| Duplex | | |
|---|---|---|
| Name | IC₅₀ (nM) | |
| AD-52431 | 5.719 | |
| AD-52432 | >10 | nM |
| AD-52433 | 0.057 | |
| AD-52437 | >10 | nM |
| AD-52438 | 0.063 | |
| AD-52439 | 0.192 | |
| AD-52443 | 0.504 | |
| AD-52444 | >10 | nM |
| AD-52445 | 0.183 | |
| AD-52449 | 0.211 | |
| AD-52450 | 2.052 | |
| AD-52451 | 0.318 | |
| AD-52455 | >10 | nM |
| AD-52456 | 1.569 | |
| AD-52461 | >10 | nM |
| AD-52462 | 0.242 | |
| AD-52463 | 0.112 | |
| AD-52467 | >10 | nM |
| AD-52468 | >10 | nM |
| AD-52469 | 0.540 | |
| AD-52473 | >10 | nM |
| AD-52474 | 0.323 | |
| AD-55983 | 0.017 | |
| AD-55983 | 0.020 | |
| AD-55989 | 0.017 | |
| AD-55989 | 0.019 | |
| AD-56016 | 0.018 | |
| AD-56016 | 0.019 | |
| AD-56017 | 0.027 | |
| AD-56017 | 0.031 | |
| AD-56053 | 0.007 | |
| AD-56053 | 0.009 | |

TABLE 7
Unmodified Sense and Antisense Strand Sequences of AGT dsRNAs (21/23 mers)

| | Position | | | | | | | |
|---|---|---|---|---|---|---|---|---|
| | relative | | | SEQ | | Position | | SEQ |
| | to NM_ | Sense | | ID | Antisense | relative to | | ID |
| Duplex Name | 000029.3 | Name | Sense Sequence | NO. | Name | NM_000029.3 | Antisense Sequence | NO. |
| UM AD-60803.1 | 830-850 | A-122599.1 | CGGGAUGCUGGCCAACUUCUU | 479 | A-122600.1 | 828-850 | AAGAAGUUGGCCAGCAUCCCGAC | 517 |
| UM AD-60775.1 | 843-863 | A-122541.1 | AACUUCUUGGGCUUCCGUAUA | 480 | A-122542.1 | 841-863 | UAUACGGAAGCCCAAGAAGUUGG | 518 |
| UM AD-60779.1 | 855-875 | A-122605.1 | UUCCGUAUAUAUGGCAUGCAA | 481 | A-122606.1 | 853-875 | UUGCAUGCCAUAUAUACGGAAGC | 519 |
| UM AD-60797.1 | 857-877 | A-122581.1 | CCGUAUAUAUGGCAUGCACAA | 482 | A-122582.1 | 855-877 | UUGUGCAUGCCAUAUAUACGGAA | 520 |
| UM AD-60806.1 | 880-900 | A-122585.1 | AGCUAUGGGGCGUGGUCCAUA | 483 | A-122586.1 | 878-900 | UAUGGACCACGCCCCAUAGCUCA | 521 |
| UM AD-60787.1 | 912-932 | A-122577.1 | CUCUCCCCAACGGCUGUCUUU | 484 | A-122578.1 | 910-932 | AAAGACAGCCGUUGGGGAGAGGA | 522 |
| UM AD-60807.1 | 913-933 | A-122601.1 | UCUCCCCAACGGCUGUCUUUA | 485 | A-122602.1 | 911-933 | UAAAGACAGCCGUUGGGGAGAGG | 523 |
| UM AD-60794.1 | 1276-1296 | A-122611.1 | UGCAGGCUGUGACAGGAUGGA | 486 | A-122612.1 | 1274-1296 | UCCAUCCUGUCACAGCCUGCAUG | 524 |
| UM AD-60796.1 | 1568-1588 | A-122565.1 | CCUGGACAAGGUGGAGGGUCU | 487 | A-122566.1 | 1566-1588 | AGACCCUCCACCUUGUCCAGGUC | 525 |
| UM AD-60778.1 | 1572-1592 | A-122589.1 | GACAAGGUGGAGGGUCUCACU | 488 | A-122590.1 | 1570-1592 | AGUGAGACCCUCCACCUUGUCCA | 526 |
| UM AD-60792.1 | 1574-1594 | A-122579.1 | CAAGGUGGAGGGUCUCACUUU | 489 | A-122580.1 | 1572-1594 | AAAGUGAGACCCUCCACCUUGUC | 527 |
| UM AD-60772.1 | 1594-1614 | A-122571.1 | UCCAGCAAAACUCCCUCAACU | 490 | A-122572.1 | 1592-1614 | AGUUGAGGGAGUUUUGCUGGAAA | 528 |
| UM AD-60773.1 | 1603-1623 | A-122587.1 | ACUCCCUCAACUGGAUGAAGA | 491 | A-122588.1 | 1601-1623 | UCUUCAUCCAGUUGAGGGAGUUU | 529 |
| UM AD-60782.1 | 1737-1757 | A-122575.1 | CUGAACCUGCAAAAAUUGAGA | 492 | A-122576.1 | 1735-1757 | UCUCAAUUUUUGCAGGUUCAGCU | 530 |
| UM AD-60800.1 | 1739-1759 | A-122551.1 | GAACCUGCAAAAAUUGAGCAA | 493 | A-122552.1 | 1737-1759 | UUGCUCAAUUUUUGCAGGUUCAG | 531 |
| UM AD-60785.1 | 1741-1761 | A-122545.1 | ACCUGCAAAAAUUGAGCAAUA | 494 | A-122546.1 | 1739-1761 | UAUUGCUCAAUUUUUGCAGGUUC | 532 |
| UM AD-60802.1 | 1742-1762 | A-122583.1 | CCUGCAAAAAUUGAGCAAUGA | 495 | A-122584.1 | 1740-1762 | UCAUUGCUCAAUUUUUGCAGGUU | 533 |
| UM AD-60799.1 | 1812-1832 | A-122613.1 | GCGGAUGAGAGAGAGCCCACA | 496 | A-122614.1 | 1810-1832 | UGUGGGCUCUCUCUCAUCCGCUU | 534 |
| UM AD-60781.1 | 1894-1914 | A-122559.1 | UGUUUGCUGUGUAUGAUCAAA | 497 | A-122560.1 | 1892-1914 | UUUGAUCAUACACAGCAAACAGG | 535 |
| UM AD-60793.1 | 2072-2092 | A-122595.1 | CACCCCCAGUCUCCCACCUUU | 498 | A-122596.1 | 2070-2092 | AAAGGUGGGAGACUGGGGGUGAC | 536 |
| UM AD-60784.1 | 2081-2101 | A-122607.1 | UCUCCCACCUUUUCUUCUAAU | 499 | A-122608.1 | 2079-2101 | AUUAGAAGAAAAGGUGGGAGACU | 537 |
| UM AD-60777.1 | 2084-2104 | A-122573.1 | CCCACCUUUUCUUCUAAUGAA | 500 | A-122574.1 | 2082-2104 | UUCAUUAGAAGAAAAGGUGGGAG | 538 |
| UM AD-60795.1 | 2270-2290 | A-122549.1 | UCCAAAAAGAAUUCCAACCGA | 501 | A-122550.1 | 2268-2290 | UCGGUUGGAAUUCUUUUUGGAAC | 539 |
| UM AD-60783.1 | 2281-2301 | A-122591.1 | UUCCAACCGACCAGCUUGUUU | 502 | A-122592.1 | 2279-2301 | AAACAAGCUGGUCGGUUGGAAUU | 540 |
| UM AD-60788.1 | 2286-2306 | A-122593.1 | ACCGACCAGCUUGUUUGUGAA | 503 | A-122594.1 | 2284-2306 | UUCACAAACAAGCUGGUCGGUUG | 541 |
| UM AD-60789.1 | 2291-2311 | A-122609.1 | CCAGCUUGUUUGUGAAACAAA | 504 | A-122610.1 | 2289-2311 | UUUGUUUCACAAACAAGCUGGUC | 542 |
| UM AD-60770.1 | 2292-2312 | A-122539.1 | CAGCUUGUUUGUGAAACAAAA | 505 | A-122540.1 | 2290-2312 | UUUUGUUUCACAAACAAGCUGGU | 543 |
| UM AD-60776.1 | 2309-2329 | A-122557.1 | AAAAAAGUGUUCCCUUUUCAA | 506 | A-122558.1 | 2307-2329 | UUGAAAAGGGAACACUUUUUUGU | 544 |
| UM AD-60798.1 | 2316-2336 | A-122597.1 | UGUUCCCUUUUCAAGUUGAGA | 507 | A-122598.1 | 2314-2336 | UCUCAACUUGAAAAGGGAACACU | 545 |
| UM AD-60801.1 | 2328-2348 | A-122567.1 | AAGUUGAGAACAAAAAUUGGA | 508 | A-122568.1 | 2326-2348 | UCCAAUUUUUGUUCUCAACUUGA | 546 |
| UM AD-60791.1 | 2329-2349 | A-122563.1 | AGUUGAGAACAAAAAUUGGGU | 509 | A-122564.1 | 2327-2349 | ACCCAAUUUUUGUUCUCAACUUG | 547 |
| UM AD-60771.1 | 2334-2354 | A-122555.1 | AGAACAAAAAUUGGGUUUUAA | 510 | A-122556.1 | 2332-2354 | UUAAAACCCAAUUUUUGUUCUCA | 548 |
| UM AD-60780.1 | 2335-2355 | A-122543.1 | GAACAAAAAUUGGGUUUUAAA | 511 | A-122544.1 | 2333-2355 | UUUAAAACCCAAUUUUUGUUCUC | 549 |
| UM AD-60786.1 | 2386-2406 | A-122561.1 | GUUUGUAUUUAGUGUCUUGAA | 512 | A-122562.1 | 2384-2406 | UUCAAGACACUAAAUACAAACCG | 550 |
| UM AD-60790.1 | 2387-2407 | A-122547.1 | UUUGUAUUUAGUGUCUUGAAU | 513 | A-122548.1 | 2385-2407 | AUUCAAGACACUAAAUACAAACC | 551 |
| UM AD-60774.1 | 2399-2419 | A-122603.1 | GUCUUGAAUGUAAGAACAUGA | 514 | A-122604.1 | 2397-2419 | UCAUGUUCUUACAUUCAAGACAC | 552 |
| UM AD-60804.1 | 2400-2420 | A-122553.1 | UCUUGAAUGUAAGAACAUGAA | 515 | A-122554.1 | 2398-2420 | UUCAUGUUCUUACAUUCAAGACA | 553 |
| UM AD-60805.1 | 2452-2472 | A-122569.1 | UUCCACAGAUGCUUGUGAUUU | 516 | A-122570.1 | 2450-2472 | AAAUCACAAGCAUCUGUGGAAAA | 554 |

TABLE 8
Modified Sense and Antisense Strand Sequences of AGT dsRNAs (21/23 mers)

| | | | SEQ | Anti- | | SEQ |
|---|---|---|---|---|---|---|
| Duplex | Sense | | ID | sense | | ID |
| Name | Name | Sense Sequence | NO. | Name | Antisense Sequence | NO. |
| AD-60770.1 | A-122539.1 | CfsasGfcUfuGfuUfUfGfuGfaAfaCfaAfaAfL96 | 555 | A-122540.1 | usUfsuUfgUfuUfcAfcaaAfcAfaGfcUfgsgsu | 593 |
| AD-60771.1 | A-122555.1 | AfsgsAfaCfaAfaAfAfUfuGfgGfuUfuUfaAfL96 | 556 | A-122556.1 | usUfsaAfaAfcCfcAfauuUfuUfgUfuCfuscsa | 594 |
| AD-60772.1 | A-122571.1 | UfscsCfaGfcAfaAfAfCfuCfcCfuCfaAfcUfL96 | 557 | A-122572.1 | asGfsuUfgAfgGfgAfguuUfuGfcUfgGfasasa | 595 |
| AD-60773.1 | A-122587.1 | AfscsUfcCfcUfcAfAfCfuGfgAfuGfaAfgAfL96 | 558 | A-122588.1 | usCfsuUfcAfuCfcAfguuGfaGfgGfaGfususu | 596 |
| AD-60774.1 | A-122603.1 | GfsusCfuUfgAfaUfGfUfaAfgAfaCfaUfgAfL96 | 559 | A-122604.1 | usCfsaUfgUfuCfuUfacaUfuCfaAfgAfcsasc | 597 |
| AD-60775.1 | A-122541.1 | AfsasCfuUfcUfuGfGfGfcUfuCfcGfuAfuAfL96 | 560 | A-122542.1 | usAfsuAfcGfgAfaGfcccAfaGfaAfgUfusgsg | 598 |
| AD-60776.1 | A-122557.1 | AfsasAfaAfaGfuGfUfUfcCfcUfuUfuCfaAfL96 | 561 | A-122558.1 | usUfsgAfaAfaGfgGfaacAfcUfuUfuUfusgsu | 599 |
| AD-60777.1 | A-122573.1 | CfscsCfaCfcUfuUfUfCfuUfcUfaAfuGfaAfL96 | 562 | A-122574.1 | usUfscAfuUfaGfaAfgaaAfaGfgUfgGfgsasg | 600 |
| AD-60778.1 | A-122589.1 | GfsasCfaAfgGfuGfGfAfgGfgUfcUfcAfcUfL96 | 563 | A-122590.1 | asGfsuGfaGfaCfcCfuccAfcCfuUfgUfcscsa | 601 |
| AD-60779.1 | A-122605.1 | UfsusCfcGfuAfuAfUfAfuGfgCfaUfgCfaAfL96 | 564 | A-122606.1 | usUfsgCfaUfgCfcAfuauAfuAfcGfgAfasgsc | 602 |
| AD-60780.1 | A-122543.1 | GfsasAfcAfaAfaAfUfUfgGfgUfuUfuAfaAfL96 | 565 | A-122544.1 | usUfsuAfaAfaCfcCfaauUfuUfuGfuUfcsusc | 603 |
| AD-60781.1 | A-122559.1 | UfsgsUfuUfgCfuGfUfGfuAfuGfaUfcAfaAfL96 | 566 | A-122560.1 | usUfsuGfaUfcAfuAfcacAfgCfaAfaCfasgsg | 604 |
| AD-60782.1 | A-122575.1 | CfsusGfaAfcCfuGfCfAfaAfaAfuUfgAfgAfL96 | 567 | A-122576.1 | usCfsuCfaAfuUfuUfugcAfgGfuUfcAfgscsu | 605 |
| AD-60783.1 | A-122591.1 | UfsusCfcAfaCfcGfAfCfcAfgCfuUfgUfuUfL96 | 568 | A-122592.1 | asAfsaCfaAfgCfuGfgucGfgUfuGfgAfasusu | 606 |
| AD-60784.1 | A-122607.1 | UfscsUfcCfcAfcCfUfUftfacUfuCfuAfaUfL96 | 569 | A-122608.1 | asUfsuAfgAfaGfaAfaagGfuGfgGfaGfascsu | 607 |
| AD-60785.1 | A-122545.1 | AfscsCfuGfcAfaAfAfAfuUfgAfgCfaAfuAfL96 | 570 | A-122546.1 | usAfsuUfgCfuCfaAfuuuUfuGfcAfgGfususc | 608 |
| AD-60786.1 | A-122561.1 | GfsusUfuGfuAfuUfUfAfgUfgUfcUfuGfaAfL96 | 571 | A-122562.1 | usUfscAfaGfaCfaCfuaaAfuAfcAfaAfcscsg | 609 |
| AD-60787.1 | A-122577.1 | CfsusCfuCfcCfcAfAfCfgGfcUfgUfcUfuUfL96 | 572 | A-122578.1 | asAfsaGfaCfaGfcCfguuGfgGfgAfgAfgsgsa | 610 |
| AD-60788.1 | A-122593.1 | AfscsCfgAfcCfaGfCfUfuGfuUfuGfuGfaAfL96 | 573 | A-122594.1 | usUfscAfcAfaAfcAfagcUfgGfuCfgGfususg | 611 |
| AD-60789.1 | A-122609.1 | CfscsAfgCfuUfgUfUfUfgUfgAfaAfcAfaAfL96 | 574 | A-122610.1 | usUfsuGfuUfuCfaCfaaaCfaAfgCfuGfgsusc | 612 |
| AD-60790.1 | A-122547.1 | UfsusUfgUfaUfuUfAfGfuGfuCfuUfgAfaUfL96 | 575 | A-122548.1 | asUfsuCfaAfgAfcAfcuaAfaUfaCfaAfascsc | 613 |
| AD-60791.1 | A-122563.1 | AfsgsUfuGfaGfaAfCfAfaAfaAfuUfgGfgUfL96 | 576 | A-122564.1 | asCfscCfaAfuUfuUfuguUfcUfcAfaCfususg | 614 |
| AD-60792.1 | A-122579.1 | CfsasAfgGfuGfgAfGfGfgUfcUfcAfcUfuUfL96 | 577 | A-122580.1 | asAfsaGfuGfaGfaCfccuCfcAfcCfuUfgsusc | 615 |
| AD-60793.1 | A-122595.1 | CfsasCfcCfcCfaGfUfCfuCfcCfaCfcUfuUfL96 | 578 | A-122596.1 | asAfsaGfgUfgGfgAfgacUfgGfgGfgUfgsasc | 616 |
| AD-60794.1 | A-122611.1 | UfsgsCfaGfgCfuGfUfGfaCfaGfgAfuGfgAfL96 | 579 | A-122612.1 | usCfscAfuCfcUfgUfcacAfgCfcUfgCfasusg | 617 |
| AD-60795.1 | A-122549.1 | UfscsCfaAfaAfaGfAfAfuUfcCfaAfcCfgAfL96 | 580 | A-122550.1 | usCfsgGfuUfgGfaAfuucUfuUfuUfgGfasasc | 618 |
| AD-60796.1 | A-122565.1 | CfscsUfgGfaCfaAfGfGfuGfgAfgGfgUfcUfL96 | 581 | A-122566.1 | asGfsaCfcCfuCfcAfccuUfgUfcCfaGfgsusc | 619 |
| AD-60797.1 | A-122581.1 | CfscsGfuAfuAfuAfUfGfgCfaUfgCfaCfaAfL96 | 582 | A-122582.1 | usUfsgUfgCfaUfgCfcauAfuAfuAfcGfgsasa | 620 |
| AD-60798.1 | A-122597.1 | UfsgsUfuCfcCfuUfUfUfcAfaGfuUfgAfgAfL96 | 583 | A-122598.1 | usCfsuCfaAfcUfuGfaaaAfgGfgAfaCfascsu | 621 |
| AD-60799.1 | A-122613.1 | GfscsGfgAfuGfaGfAfGfaGfaGfcCfcAfcAfL96 | 584 | A-122614.1 | usGfsuGfgGfcUfcUfcucUfcAfuCfcGfcsusu | 622 |
| AD-60800.1 | A-122551.1 | GfsasAfcCfuGfcAfAfAfaAfuUfgAfgCfaAfL96 | 585 | A-122552.1 | usUfsgCfuCfaAfuUfuuuGfcAfgGfuUfcsasg | 623 |
| AD-60801.1 | A-122567.1 | AfsasGfuUfgAfgAfAfCfaAfaAfaUfuGfgAfL96 | 586 | A-122568.1 | usCfscAfaUfuUfuUfguuCfuCfaAfcUfusgsa | 624 |
| AD-60802.1 | A-122583.1 | CfscsUfgCfaAfaAfAfUfuGfaGfcAfaUfgAfL96 | 587 | A-122584.1 | usCfsaUfuGfcUfcAfauuUfuUfgCfaGfgsusu | 625 |
| AD-60803.1 | A-122599.1 | CfsgsGfgAfuGfcUfGfGfcCfaAfcUfuCfuUfL96 | 588 | A-122600.1 | asAfsgAfaGfuUfgGfccaGfcAfuCfcCfgsasc | 626 |
| AD-60804.1 | A-122553.1 | UfscsUfuGfaAfuGfUfAfaGfaAfcAfuGfaAfL96 | 589 | A-122554.1 | usUfscAfuGfuUfcUfuacAfuUfcAfaGfascsa | 627 |
| AD-60805.1 | A-122569.1 | UfsusCfcAfcAfgAfUfGfcUfuGfuGfaUfuUfL96 | 590 | A-122570.1 | asAfsaUfcAfcAfaGfcauCfuGfuGfgAfasasa | 628 |
| AD-60806.1 | A-122585.1 | AfsgsCfuAfuGfgGfGfCfgUfgGfuCfcAfuAfL96 | 591 | A-122586.1 | usAfsuGfgAfcCfaCfgccCfcAfuAfgCfuscsa | 629 |
| AD-60807.1 | A-122601.1 | UfscsUfcCfcCfaAfCfGfgCfuGfuCfuUfuAfL96 | 592 | A-122602.1 | usAfsaAfgAfcAfgCfcguUfgGfgGfaGfasgsg | 630 |

TABLE 9
AGT single dose screen in Hep3B cells (21/23 mers)

| | | | | | Start position |
|---|---|---|---|---|---|
| Duplex | 10 nM | 10 nM | 0.1 nM | 0.1 nM | relative to |
| Name | Avg | SD | Avg | SD | NM_000029.3 |
| AD-60770.1 | 4.7 | 0.7 | 27.4 | 7.4 | 2292 |
| AD-60771.1 | 4.6 | 1.2 | 10.9 | 5.9 | 2334 |
| AD-60772.1 | 14.8 | 7.9 | 63.7 | 13.2 | 1594 |
| AD-60773.1 | 43.9 | 8.7 | 88.8 | 5.4 | 1603 |
| AD-60774.1 | 64.0 | 3.8 | 79.1 | 4.2 | 2399 |
| AD-60775.1 | 8.4 | 2.8 | 62.2 | 8.8 | 843 |
| AD-60776.1 | 5.9 | 2.8 | 11.1 | 5.1 | 2309 |
| AD-60777.1 | 4.3 | 1.7 | 26.7 | 5.3 | 2084 |
| AD-60778.1 | 11.5 | 7.4 | 52.5 | 15.5 | 1572 |
| AD-60779.1 | 5.2 | 2.8 | 24.1 | 4.1 | 855 |
| AD-60780.1 | 5.7 | 2.3 | 12.0 | 5.2 | 2335 |
| AD-60781.1 | 6.9 | 2.1 | 18.5 | 3.1 | 1894 |
| AD-60782.1 | 9.2 | 5.0 | 47.0 | 8.6 | 1737 |
| AD-60783.1 | 15.9 | 9.0 | 35.7 | 7.6 | 2281 |
| AD-60784.1 | 5.6 | 1.0 | 12.3 | 2.5 | 2081 |
| AD-60785.1 | 6.1 | 0.9 | 29.7 | 13.7 | 1741 |
| AD-60786.1 | 56.9 | 5.4 | 74.0 | 5.1 | 2386 |
| AD-60787.1 | 94.4 | 0.7 | 104.4 | 6.0 | 912 |
| AD-60788.1 | 10.5 | 3.6 | 49.8 | 4.8 | 2286 |
| AD-60789.1 | 5.2 | 2.0 | 25.3 | 16.0 | 2291 |
| AD-60790.1 | 70.4 | 3.3 | 86.3 | 19.7 | 2387 |
| AD-60791.1 | 7.8 | 3.7 | 33.4 | 18.0 | 2329 |
| AD-60792.1 | 17.0 | 3.3 | 72.8 | 9.0 | 1574 |
| AD-60793.1 | 18.4 | 5.6 | 58.3 | 12.5 | 2072 |
| AD-60794.1 | 54.3 | 11.5 | 101.6 | 4.3 | 1276 |
| AD-60795.1 | 6.2 | 3.4 | 36.3 | 8.6 | 2270 |
| AD-60796.1 | 41.6 | 3.3 | 100.9 | 8.6 | 1568 |
| AD-60797.1 | 72.5 | 2.8 | 97.1 | 6.1 | 857 |
| AD-60798.1 | 13.2 | 4.8 | 29.1 | 16.4 | 2316 |
| AD-60799.1 | 29.7 | 7.5 | 86.2 | 4.2 | 1812 |
| AD-60800.1 | 31.0 | 7.5 | 81.8 | 11.2 | 1739 |
| AD-60801.1 | 10.9 | 2.2 | 35.4 | 11.3 | 2328 |
| AD-60802.1 | 14.8 | 5.5 | 52.8 | 9.7 | 1742 |
| AD-60803.1 | 29.2 | 10.9 | 71.4 | 9.6 | 830 |
| AD-60804.1 | 39.2 | 2.9 | 75.6 | 6.1 | 2400 |
| AD-60805.1 | 60.3 | 10.1 | 97.4 | 2.3 | 2452 |
| AD-60806.1 | 89.3 | 11.8 | 92.8 | 6.5 | 880 |
| AD-60807.1 | 64.1 | 3.7 | 91.5 | 10.1 | 913 |

TABLE 10
AGT IC₅₀ data in Hep3B Cells (21/23 mers)

| Duplex Name | IC₅₀ (nM) |
|---|---|
| AD-60771.1 | 0.028 |
| AD-60776.1 | 0.033 |
| AD-60780.1 | 0.038 |
| AD-60784.1 | 0.045 |
| AD-60781.1 | 0.089 |

### Example 2. In Vivo AGT Silencing—Amelioration of Preeclamptic Sequelae

[0689] Transgenic female Sprague-Dawley rats harboring the complete genomic human AGT gene (e.g., [TGR(hAGT)L1623] (see, e.g., Bohlender J, et al. (1996) Hypertension 27: 535-540 and Bohlender J, et al. (2000) J Am Soc Nephrol 11: 2056-2061)) were surgically implemented with a device for measuring blood pressure by telemetry. Subsequent to recovery from the procedure, these rats were mated with transgenic male Sprague-Dawley rats harboring the entire genomic human REN gene (e.g., [TGR(hREN)L10J] (see, e.g., Bohlender J, et al. (1997) Hypertension 29: 428-434 and Bohlender J, et al. (2000) J Am Soc Nephrol 11: 2056-2061)). The female progeny of this cross (referred to herein as “PE rats”) are a model of preeclampsia and develop albuminuria and intrauterine growth restriction (IUGR), and have a blood pressure spike beginning around gestation day 13 (see, e.g., FIG. 2A).

[0690] Beginning on day 3 of gestation, a subset of pregnant PE rats was administered 10 mg/kg siRNA targeting hAGT (AD-60771). A second subset of pregnant PE rats were left untreated as a control. Dosing continued every third day to gestation day 15. Rats were sacrificed on about day 19 of gestation, and blood and tissue samples were collected from the mothers and the fetuses.

[0691] Maternal blood pressure was monitored throughout the experiment via surgically implemented devices for measuring blood pressure by telemetry. FIG. 2A shows that following administration of AD-60771, maternal mean arterial blood pressure was significantly lowered. In addition, as determined by ELISA analysis of serum albumin, maternal albuminuria was significantly reduced following administration of AD-60771 (FIG. 2B). These two conditions are the hallmarks of preeclampsia. The reduced blood pressure reduces cardiovascular events associated with the disease, while reduced albuminuria is indicative of improved renal function.

[0692] Preeclampsia is also associated with reduced placental size, possibly related to poor perfusion. As a result of the condition, fetal growth is impaired. Following maternal administration of AD-60771, however, uteroplacental unit weight (FIG. 3A) and fetal weight (FIG. 3B) were increased, and there was normalization of the fetal brain:liver ratio (FIG. 3C), all indicative of a more normal placental and fetal development.

[0693] As determined by RT-qPCR analysis of mRNA expression of hAGT in maternal liver and placenta, it was shown that, while there is substantial silencing of hAGT in the maternal liver (FIG. 4A), there was no significant silencing in the placenta (FIG. 4B). This indicates a lack of penetration of the iRNA into the placenta.

[0694] In addition, analysis of four maternal liver samples, four placenta samples, and eight fetal liver samples demonstrated that the exposure of the fetal liver to the iRNA was about 1.2 ng siRNA/g (below the limit of detection, 1.3 ng siRNA/g tissue) of tissue and that exposure of the maternal liver to the iRNA was about 265-fold greater than the exposure of the placenta to the iRNA (FIG. 5). Tissue exposure was determined by stem-loop qPCR, as previously described (see, e.g., Landesman, Y., et al. (2010) Silence 1:16.

[0695] Thus, maternal treatment with an iRNA targeting hAGT is superior to maternal treatment with small-molecule renin-angiotensin inhibitors, such as ACE inhibitors, and angiotensin receptor blockers, as these compounds cross the placenta and are fetotoxic.

[0696] As the placenta acts as the conduit for nutrients to the fetus, and waste removal from the fetus, its composition is critical. Accordingly, placental pathology was evaluated (i.e., by measuring the area of tissue slices immunohistochemically stained for cytokeratin). FIG. 6 demonstrates that while the maternal portion of the placenta (the mesometrial triangle; FIG. 6D) and the trophospongium (a uniform layer of cells which are precursors of differentiated trophoblasts; FIG. 6E) were unchanged by administration of AD-60771, overall placental size was increased (FIGS. 6B, 6C, and 6F and FIG. 6A for reference). In particular, the size of the labyrinth, which is the site of nutritional exchange between fetal and maternal blood, was increased by maternal treatment with AD-60771 (FIG. 6G).

[0697] The anti-angiogenic soluble fms-like tyrosine kinase-1 (sFLT1) and the angiogenic placental growth factor (PLGF), which are regulated by angiotensins, play a key role in preeclampsia, being released from the placenta into the maternal blood stream and causing endothelial dysfunction. sFlt-1, is largely released from the placenta into the maternal blood stream and causes endothelial dysfunction. PLGF is placental derived, and promotes angiogenesis. The ratio of sFlt-1:PLGF is diagnostic, with a higher sFlt-1:PLGF associated with more severe disease.

[0698] Evaluation of the mRNA expression of sFLT1 and PLGF by RT-qPCR analysis demonstrated that the levels of both sFLT1 and PLGF were significantly reduced in the maternal kidney (FIGS. 7A and 7B, respectively), but remained unchanged in the placenta (FIGS. 7C and 7D, respectively) following maternal administration of AD-60771. However, as sFlt-1 was reduced to a greater extent than PLGF in the maternal kidney, the serum sFlt-1:PLGF ratio may be improved.

[0699] Agonistic autoantibodies to the angiotensin II receptor type I (AT1) have been identified in preeclamptic women. When pregnant rodents are exposed to AT1 autoantibodies, a preeclampsia-like syndrome develops. As activation of AT1 is associated with vasopressor effects as well as aldosterone secretion and sFlt-1 production, reduction of AT1 autoantibodies would be expected to reduce the preeclamptic phenotype. Accordingly, the level of production of agonistic autoantibodies to the AT1 receptor (AT1-AA) may also be evaluated by biochromatography and subsequent bioassay of isolated antibodies. AT1-AA levels were measured as has been described (see, e.g., Dechend, et al. (2005) Hypertension 45:742-746) by assessing the impact of isolated, purified AT1-AA antibodies on the spontaneous beating rate of neonatal rat cardiomyocytes. FIG. 8 demonstrates that there was a significant reduction in the level of AT1-AA following administration of AD-60771 to pregnant PE rats.

### Example 3. In Vivo AGT Silencing in a Transgenic Rat Model of Preeclampsia

[0700] The AD-60771 duplex was tested for the ability to silence hAGT expression in pregnant PE rats, described in the previous example. Beginning on day 3 of gestation, a subset of pregnant PE rats was administered 10 mg/kg siRNA targeting hAGT (AD-60771). Liver and blood were collected at gestation day 21 and the levels of hAGT and rAGT protein and mRNA were assayed and compared to the levels of hAGT and rAGT protein and mRNA present in untreated, pregnant transgenic rats, pregnant Sprague-Dawley rats, and non-pregnant Sprague-Dawley rats. The results of these assays are shown in FIGS. 9A and 9B and demonstrate that there was an 80% reduction of circulating AT2 and a 95% reduction of circulating hAT1 in the pregnant PE rats treated with AD-60771 as compared to control pregnant PE rats. A reduction of about 45% of rat AT2 was also observed in the pregnant PE rats treated with AD-60771 as compared to control pregnant PE rats. A 95% silencing of hepatic AGT mRNA was observed in the pregnant PE rats treated with AD-60771 as compared to control pregnant PE rats. FIGS. 9A and 9B also demonstrate that there was a significant reduction in the serum level of AT1 and AT2 following administration of AD-60771 to pregnant PE rats.

TABLE 11
Unmodified Sense and Antisense Strand Sequences of AGT dsRNAs (21/23 mers)

| | Sense | | SEQ | | | SEQ | |
|---|---|---|---|---|---|---|---|
| Duplex | Oligo | | ID | Antisense | | ID | Location on |
| Name | Name | Sequence | NO. | Oligo Name | Sequence | NO. | NM_000029.3 |
| AD-67864.1 | A-135936.1 | CGGGCAGCAGGGUCAGAAA | 631 | A-135937.1 | UUUCUGACCCUGCUGCCCG | 828 | 10-28 |
| AD-67865.1 | A-135938.1 | UCAGAAGUGGCCCCCGUGU | 632 | A-135939.1 | ACACGGGGGCCACUUCUGA | 829 | 22-40_as |
| AD-67866.1 | A-135940.1 | CCCGUGUUGCCUAAGCAAA | 633 | A-135941.1 | UUUGCUUAGGCAACACGGG | 830 | 34-52_G19A_as |
| AD-67867.1 | A-135948.1 | UGCACCUCCGGCCUGCAUA | 634 | A-135949.1 | UAUGCAGGCCGGAGGUGCA | 831 | 76-94_G19A_as |
| AD-67868.1 | A-135950.1 | UGCAUGUCCCUGUGGCCUA | 635 | A-135951.1 | UAGGCCACAGGGACAUGCA | 832 | 89-107 |
| AD-67869.1 | A-135952.1 | UGUGGCCUCUUGGGGGUAA | 636 | A-135953.1 | UUACCCCCAAGAGGCCACA | 833 | 99-117 |
| AD-67870.1 | A-135958.1 | GGUCAGAAGGCCUGGGUGA | 637 | A-135959.1 | UCACCCAGGCCUUCUGACC | 834 | 132- |
| | | | | | | | 150_G19A_as |
| AD-67871.1 | A-135960.1 | UGGGUGGUUGGCCUCAGGA | 638 | A-135961.1 | UCCUGAGGCCAACCACCCA | 835 | 144-162 |
| AD-67872.1 | A-135962.1 | CCUCAGGCUGUCACACACA | 639 | A-135963.1 | UGUGUGUGACAGCCUGAGG | 836 | 155-173 |
| AD-67873.1 | A-135964.1 | CACACACCUAGGGAGAUGA | 640 | A-135965.1 | UCAUCUCCCUAGGUGUGUG | 837 | 166-184 |
| AD-67874.1 | A-135966.1 | AGGGAGAUGCUCCCGUUUA | 641 | A-135967.1 | UAAACGGGAGCAUCUCCCU | 838 | 175-193 |
| AD-67875.1 | A-135968.1 | CCGUUUCUGGGAACCUUGA | 642 | A-135969.1 | UCAAGGUUCCCAGAAACGG | 839 | 187- |
| | | | | | | | 205_G19A_as |
| AD-67876.1 | A-135970.1 | AACCUUGGCCCCGACUCCU | 643 | A-135971.1 | AGGAGUCGGGGCCAAGGUU | 840 | 198-216_as |
| AD-67877.1 | A-135972.1 | CGACUCCUGCAAACUUCGA | 644 | A-135973.1 | UCGAAGUUUGCAGGAGUCG | 841 | 209- |
| | | | | | | | 227_G19A_as |
| AD-67878.1 | A-135974.1 | AACUUCGGUAAAUGUGUAA | 645 | A-135975.1 | UUACACAUUUACCGAAGUU | 842 | 220-238_as |
| AD-67879.1 | A-135976.1 | UGUGUAACUCGACCCUGCA | 646 | A-135977.1 | UGCAGGGUCGAGUUACACA | 843 | 232-250_as |
| AD-67880.1 | A-135978.1 | ACCCUGCACCGGCUCACUA | 647 | A-135979.1 | UAGUGAGCCGGUGCAGGGU | 844 | 243-261 |
| AD-67881.1 | A-135980.1 | GCUCACUCUGUUCAGCAGU | 648 | A-135981.1 | ACUGCUGAACAGAGUGAGC | 845 | 254-272_as |
| AD-67882.1 | A-135982.1 | UUCAGCAGUGAAACUCUGA | 649 | A-135983.1 | UCAGAGUUUCACUGCUGAA | 846 | 264-282 |
| AD-67883.1 | A-135984.1 | AAACUCUGCAUCGAUCACU | 650 | A-135985.1 | AGUGAUCGAUGCAGAGUUU | 847 | 274-292_as |
| AD-67884.1 | A-135986.1 | CGAUCACUAAGACUUCCUA | 651 | A-135987.1 | UAGGAAGUCUUAGUGAUCG | 848 | 285- |
| | | | | | | | 303_G19A_as |
| AD-67885.1 | A-135990.1 | GAGGUCCCAGCGUGAGUGU | 652 | A-135991.1 | ACACUCACGCUGGGACCUC | 849 | 307-325_as |
| AD-67886.1 | A-135994.1 | UUCUGGCAUCUGUCCUUCU | 653 | A-135995.1 | AGAAGGACAGAUGCCAGAA | 850 | 329-347_as |
| AD-67887.1 | A-135996.1 | CCUUCUGGCCAGCCUGUGA | 654 | A-135997.1 | UCACAGGCUGGCCAGAAGG | 851 | 342- |
| | | | | | | | 360_G19A_as |
| AD-67888.1 | A-135998.1 | AGCCUGUGGUCUGGCCAAA | 655 | A-135999.1 | UUUGGCCAGACCACAGGCU | 852 | 352- |
| | | | | | | | 370_G19A_as |
| AD-67889.1 | A-136000.1 | GGCCAAGUGAUGUAACCCU | 656 | A-136001.1 | AGGGUUACAUCACUUGGCC | 853 | 364-382_as |
| AD-67890.1 | A-136002.1 | UGUAACCCUCCUCUCCAGA | 657 | A-136003.1 | UCUGGAGAGGAGGGUUACA | 854 | 374-392 |
| AD-67891.1 | A-136004.1 | UCUCCAGCCUGUGCACAGA | 658 | A-136005.1 | UCUGUGCACAGGCUGGAGA | 855 | 385- |
| | | | | | | | 403_G19A_as |
| AD-67892.1 | A-136006.1 | UGCACAGGCAGCCUGGGAA | 659 | A-136007.1 | UUCCCAGGCUGCCUGUGCA | 856 | 396-414_as |
| AD-67893.1 | A-136008.1 | CCUGGGAACAGCUCCAUCA | 660 | A-136009.1 | UGAUGGAGCUGUUCCCAGG | 857 | 407-425 |
| AD-67894.1 | A-136010.1 | UCCAUCCCCACCCCUCAGA | 661 | A-136011.1 | UCUGAGGGGUGGGGAUGGA | 858 | 419-437 |
| AD-67895.1 | A-136012.1 | CCCUCAGCUAUAAAUAGGA | 662 | A-136013.1 | UCCUAUUUAUAGCUGAGGG | 859 | 430- |
| | | | | | | | 448_G19A_as |
| AD-67896.1 | A-136014.1 | UAAAUAGGGCAUCGUGACA | 663 | A-136015.1 | UGUCACGAUGCCCUAUUUA | 860 | 440-458 |
| AD-67897.1 | A-136016.1 | AUCGUGACCCGGCCGGGGA | 664 | A-136017.1 | UCCCCGGCCGGGUCACGAU | 861 | 450- |
| | | | | | | | 468_G19A_as |
| AD-67898.1 | A-136018.1 | CCGGGGGAAGAAGCUGCCA | 665 | A-136019.1 | UGGCAGCUUCUUCCCCCGG | 862 | 462- |
| | | | | | | | 480_G19A_as |
| AD-67899.1 | A-136020.1 | AGCUGCCGUUGUUCUGGGU | 666 | A-136021.1 | ACCCAGAACAACGGCAGCU | 863 | 473-491_as |
| AD-67900.1 | A-136022.1 | UUCUGGGUACUACAGCAGA | 667 | A-136023.1 | UCUGCUGUAGUACCCAGAA | 864 | 484-502_as |
| AD-67901.1 | A-136024.1 | UACAGCAGAAGGGUAUGCA | 668 | A-136025.1 | UGCAUACCCUUCUGCUGUA | 865 | 494- |
| | | | | | | | 512_G19A_as |
| AD-67902.1 | A-136026.1 | UAUGCGGAAGCGAGCACCA | 669 | A-136027.1 | UGGUGCUCGCUUCCGCAUA | 866 | 507-525 |
| AD-67903.1 | A-136028.1 | CGAGCACCCCAGUCUGAGA | 670 | A-136029.1 | UCUCAGACUGGGGUGCUCG | 867 | 517-535_as |
| AD-67904.1 | A-136032.1 | CUCCUGCCGGUGUGAGCCU | 671 | A-136033.1 | AGGCUCACACCGGCAGGAG | 868 | 539-557_as |
| AD-67905.1 | A-136034.1 | UGUGAGCCUGAGGGCCACA | 672 | A-136035.1 | UGUGGCCCUCAGGCUCACA | 869 | 549-567 |
| AD-67906.1 | A-136036.1 | GGGCCACCAUCCUCUGCCU | 673 | A-136037.1 | AGGCAGAGGAUGGUGGCCC | 870 | 560-578_as |
| AD-67907.1 | A-136038.1 | CUGCCUCCUGGCCUGGGCU | 674 | A-136039.1 | AGCCCAGGCCAGGAGGCAG | 871 | 573-591_as |
| AD-67908.1 | A-136042.1 | CCUGGCUGCAGGUGACCGA | 675 | A-136043.1 | UCGGUCACCUGCAGCCAGG | 872 | 594- |
| | | | | | | | 612_G19A_as |
| AD-67909.1 | A-136044.1 | UGACCGGGUGUACAUACAA | 676 | A-136045.1 | UUGUAUGUACACCCGGUCA | 873 | 606-624 |
| AD-67910.1 | A-136046.1 | UACAUACACCCCUUCCACA | 677 | A-136047.1 | UGUGGAAGGGGUGUAUGUA | 874 | 616-634 |
| AD-67911.1 | A-136048.1 | UUCCACCUCGUCAUCCACA | 678 | A-136049.1 | UGUGGAUGACGAGGUGGAA | 875 | 628-646_as |
| AD-67912.1 | A-136050.1 | UCAUCCACAAUGAGAGUAA | 679 | A-136051.1 | UUACUCUCAUUGUGGAUGA | 876 | 638-656 |
| AD-67913.1 | A-136056.1 | AAAGGCCAAUGCCGGGAAA | 680 | A-136057.1 | UUUCCCGGCAUUGGCCUUU | 877 | 672- |
| | | | | | | | 690_G19A_as |
| AD-67914.1 | A-136058.1 | CCGGGAAGCCCAAAGACCA | 681 | A-136059.1 | UGGUCUUUGGGCUUCCCGG | 878 | 683-701 |
| AD-67915.1 | A-136060.1 | AAAGACCCCACCUUCAUAA | 682 | A-136061.1 | UUAUGAAGGUGGGGUCUUU | 879 | 694-712 |
| AD-67916.1 | A-136062.1 | CCUUCAUACCUGCUCCAAU | 683 | A-136063.1 | AUUGGAGCAGGUAUGAAGG | 880 | 704-722_as |
| AD-67917.1 | A-136064.1 | CUCCAAUUCAGGCCAAGAA | 684 | A-136065.1 | UUCUUGGCCUGAAUUGGAG | 881 | 716-734 |
| AD-67918.1 | A-136066.1 | AGGCCAAGACAUCCCCUGU | 685 | A-136067.1 | ACAGGGGAUGUCUUGGCCU | 882 | 725-743_as |
| AD-67919.1 | A-136068.1 | UCCCCUGUGGAUGAAAAGA | 686 | A-136069.1 | UCUUUUCAUCCACAGGGGA | 883 | 736- |
| | | | | | | | 754_G19A_as |
| AD-67920.1 | A-136070.1 | AAAAGGCCCUACAGGACCA | 687 | A-136071.1 | UGGUCCUGUAGGGCCUUUU | 884 | 749-767_as |
| AD-67921.1 | A-136072.1 | UACAGGACCAGCUGGUGCU | 688 | A-136073.1 | AGCACCAGCUGGUCCUGUA | 885 | 758-776_as |
| AD-67922.1 | A-136078.1 | UUGACACCGAAGACAAGUU | 689 | A-136079.1 | AACUUGUCUUCGGUGUCAA | 886 | 791-809_as |
| AD-67923.1 | A-136080.1 | ACAAGUUGAGGGCCGCAAU | 690 | A-136081.1 | AUUGCGGCCCUCAACUUGU | 887 | 803-821_as |
| AD-67924.1 | A-136082.1 | GCCGCAAUGGUCGGGAUGA | 691 | A-136083.1 | UCAUCCCGACCAUUGCGGC | 888 | 814-832 |
| AD-67925.1 | A-136084.1 | CGGGAUGCUGGCCAACUUA | 692 | A-136085.1 | UAAGUUGGCCAGCAUCCCG | 889 | 825-843 |
| AD-67926.1 | A-136086.1 | CAACUUCUUGGGCUUCCGU | 693 | A-136087.1 | ACGGAAGCCCAAGAAGUUG | 890 | 837-855_as |
| AD-67927.1 | A-136088.1 | GGCUUCCGUAUAUAUGGCA | 694 | A-136089.1 | UGCCAUAUAUACGGAAGCC | 891 | 847-865_as |
| AD-67928.1 | A-136090.1 | UAUGGCAUGCACAGUGAGA | 695 | A-136091.1 | UCUCACUGUGCAUGCCAUA | 892 | 859-877 |
| AD-67929.1 | A-136092.1 | ACAGUGAGCUAUGGGGCGU | 696 | A-136093.1 | ACGCCCCAUAGCUCACUGU | 893 | 869-887_as |
| AD-67930.1 | A-136098.1 | CGUCCUCUCCCCAACGGCU | 697 | A-136099.1 | AGCCGUUGGGGAGAGGACG | 894 | 903-921_as |
| AD-67931.1 | A-136102.1 | UUUGGCACCCUGGCCUCUA | 698 | A-136103.1 | UAGAGGCCAGGGUGCCAAA | 895 | 925-943 |
| AD-67932.1 | A-136104.1 | CUGGCCUCUCUCUAUCUGA | 699 | A-136105.1 | UCAGAUAGAGAGAGGCCAG | 896 | 934- |
| | | | | | | | 952_G19A_as |
| AD-67933.1 | A-136106.1 | UAUCUGGGAGCCUUGGACA | 700 | A-136107.1 | UGUCCAAGGCUCCCAGAUA | 897 | 946-964 |
| AD-67934.1 | A-136108.1 | UUGGACCACACAGCUGACA | 701 | A-136109.1 | UGUCAGCUGUGUGGUCCAA | 898 | 958-976_as |
| AD-67935.1 | A-136110.1 | ACAGCUGACAGGCUACAGA | 702 | A-136111.1 | UCUGUAGCCUGUCAGCUGU | 899 | 967- |
| | | | | | | | 985_G19A_as |
| AD-67936.1 | A-136112.1 | UACAGGCAAUCCUGGGUGU | 703 | A-136113.1 | ACACCCAGGAUUGCCUGUA | 900 | 980-998_as |
| AD-67937.1 | A-136114.1 | UCCUGGGUGUUCCUUGGAA | 704 | A-136115.1 | UUCCAAGGAACACCCAGGA | 901 | 989-1007_as |
| AD-67938.1 | A-136116.1 | UUGGAAGGACAAGAACUGA | 705 | A-136117.1 | UCAGUUCUUGUCCUUCCAA | 902 | 1002-1020 |
| AD-67939.1 | A-136118.1 | AGAACUGCACCUCCCGGCU | 706 | A-136119.1 | AGCCGGGAGGUGCAGUUCU | 903 | 1013-1031_as |
| AD-67940.1 | A-136122.1 | UGCGCACAAGGUCCUGUCU | 707 | A-136123.1 | AGACAGGACCUUGUGCGCA | 904 | 1035-1053_as |
| AD-67947.1 | A-136126.1 | CUGCAGGCUGUACAGGGCA | 708 | A-136127.1 | UGCCCUGUACAGCCUGCAG | 905 | 1057-1075 |
| AD-67948.1 | A-136128.1 | UACAGGGCCUGCUAGUGGA | 709 | A-136129.1 | UCCACUAGCAGGCCCUGUA | 906 | 1067-1085 |
| AD-67949.1 | A-136130.1 | UAGUGGCCCAGGGCAGGGA | 710 | A-136131.1 | UCCCUGCCCUGGGCCACUA | 907 | 1079-1097 |
| AD-67950.1 | A-136132.1 | AGGGCAGGGCUGAUAGCCA | 711 | A-136133.1 | UGGCUAUCAGCCCUGCCCU | 908 | 1088-1106_as |
| AD-67951.1 | A-136134.1 | UAGCCAGGCCCAGCUGCUA | 712 | A-136135.1 | UAGCAGCUGGGCCUGGCUA | 909 | 1101- |
| | | | | | | | 1119_G19A_as |
| AD-67952.1 | A-136136.1 | AGCUGCUGCUGUCCACGGU | 713 | A-136137.1 | ACCGUGGACAGCAGCAGCU | 910 | 1112-1130_as |
| AD-67954.1 | A-136140.1 | UGGGCGUGUUCACAGCCCA | 714 | A-136141.1 | UGGGCUGUGAACACGCCCA | 911 | 1133-1151 |
| AD-67955.1 | A-136142.1 | CACAGCCCCAGGCCUGCAA | 715 | A-136143.1 | UUGCAGGCCUGGGGCUGUG | 912 | 1143-1161 |
| AD-67956.1 | A-136144.1 | CUGCACCUGAAGCAGCCGU | 716 | A-136145.1 | ACGGCUGCUUCAGGUGCAG | 913 | 1156-1174_as |
| AD-67957.1 | A-136146.1 | AGCAGCCGUUUGUGCAGGA | 717 | A-136147.1 | UCCUGCACAAACGGCUGCU | 914 | 1166- |
| | | | | | | | 1184_G19A_as |
| AD-67958.1 | A-136148.1 | UGCAGGGCCUGGCUCUCUA | 718 | A-136149.1 | UAGAGAGCCAGGCCCUGCA | 915 | 1178-1196_as |
| AD-67959.1 | A-136150.1 | UGGCUCUCUAUACCCCUGU | 719 | A-136151.1 | ACAGGGGUAUAGAGAGCCA | 916 | 1187-1205_as |
| AD-67960.1 | A-136152.1 | ACCCCUGUGGUCCUCCCAA | 720 | A-136153.1 | UUGGGAGGACCACAGGGGU | 917 | 1198-1216 |
| AD-67962.1 | A-136156.1 | CUGGACUUCACAGAACUGA | 721 | A-136157.1 | UCAGUUCUGUGAAGUCCAG | 918 | 1222- |
| | | | | | | | 1240_G19A_as |
| AD-67963.1 | A-136158.1 | AGAACUGGAUGUUGCUGCU | 722 | A-136159.1 | AGCAGCAACAUCCAGUUCU | 919 | 1233-1251_as |
| AD-67964.1 | A-136160.1 | UUGCUGCUGAGAAGAUUGA | 723 | A-136161.1 | UCAAUCUUCUCAGCAGCAA | 920 | 1244-1262_as |
| AD-67965.1 | A-136162.1 | AGAAGAUUGACAGGUUCAU | 724 | A-136163.1 | AUGAACCUGUCAAUCUUCU | 921 | 1253-1271_as |
| AD-67966.1 | A-136164.1 | AGGUUCAUGCAGGCUGUGA | 725 | A-136165.1 | UCACAGCCUGCAUGAACCU | 922 | 1264-1282_as |
| AD-67967.1 | A-136166.1 | GCUGUGACAGGAUGGAAGA | 726 | A-136167.1 | UCUUCCAUCCUGUCACAGC | 923 | 1276-1294_as |
| AD-67968.1 | A-136168.1 | UGGAAGACUGGCUGCUCCA | 727 | A-136169.1 | UGGAGCAGCCAGUCUUCCA | 924 | 1288-1306 |
| AD-67970.1 | A-136172.1 | AUGGGAGCCAGUGUGGACA | 728 | A-136173.1 | UGUCCACACUGGCUCCCAU | 925 | 1309-1327_as |
| AD-67971.1 | A-136174.1 | UGUGGACAGCACCCUGGCU | 729 | A-136175.1 | AGCCAGGGUGCUGUCCACA | 926 | 1320-1338_as |
| AD-67972.1 | A-136176.1 | CCUGGCUUUCAACACCUAA | 730 | A-136177.1 | UUAGGUGUUGAAAGCCAGG | 927 | 1332-1350 |
| AD-67973.1 | A-136178.1 | CAACACCUACGUCCACUUA | 731 | A-136179.1 | UAAGUGGACGUAGGUGUUG | 928 | 1341-1359 |
| AD-67974.1 | A-136180.1 | CACUUCCAAGGGAAGAUGA | 732 | A-136181.1 | UCAUCUUCCCUUGGAAGUG | 929 | 1354-1372_as |
| AD-67975.1 | A-136182.1 | GGGAAGAUGAAGGGCUUCU | 733 | A-136183.1 | AGAAGCCCUUCAUCUUCCC | 930 | 1363-1381_as |
| AD-67976.1 | A-136184.1 | GCUUCUCCCUGCUGGCCGA | 734 | A-136185.1 | UCGGCCAGCAGGGAGAAGC | 931 | 1376-1394_as |
| AD-67978.1 | A-136188.1 | CCAGGAGUUCUGGGUGGAA | 735 | A-136189.1 | UUCCACCCAGAACUCCUGG | 932 | 1398-1416 |
| AD-67979.1 | A-136190.1 | UGGGUGGACAACAGCACCU | 736 | A-136191.1 | AGGUGCUGUUGUCCACCCA | 933 | 1408-1426_as |
| AD-67980.1 | A-136192.1 | ACAGCACCUCAGUGUCUGU | 737 | A-136193.1 | ACAGACACUGAGGUGCUGU | 934 | 1418-1436_as |
| AD-67981.1 | A-136194.1 | UGUCUGUUCCCAUGCUCUA | 738 | A-136195.1 | UAGAGCAUGGGAACAGACA | 935 | 1430-1448 |
| AD-67982.1 | A-136196.1 | CAUGCUCUCUGGCAUGGGA | 739 | A-136197.1 | UCCCAUGCCAGAGAGCAUG | 936 | 1440-1458 |
| AD-67983.1 | A-136198.1 | AUGGGCACCUUCCAGCACU | 740 | A-136199.1 | AGUGCUGGAAGGUGCCCAU | 937 | 1453-1471_as |
| AD-67984.1 | A-136200.1 | UUCCAGCACUGGAGUGACA | 741 | A-136201.1 | UGUCACUCCAGUGCUGGAA | 938 | 1462-1480_as |
| AD-67986.1 | A-136204.1 | AGGACAACUUCUCGGUGAA | 742 | A-136205.1 | UUCACCGAGAAGUUGUCCU | 939 | 1484-1502 |
| AD-67987.1 | A-136206.1 | UCGGUGACUCAAGUGCCCU | 743 | A-136207.1 | AGGGCACUUGAGUCACCGA | 940 | 1495-1513_as |
| AD-67988.1 | A-136208.1 | UGCCCUUCACUGAGAGCGA | 744 | A-136209.1 | UCGCUCUCAGUGAAGGGCA | 941 | 1508-1526 |
| AD-67989.1 | A-136210.1 | UGAGAGCGCCUGCCUGCUA | 745 | A-136211.1 | UAGCAGGCAGGCGCUCUCA | 942 | 1518- |
| | | | | | | | 1536_G19A_as |
| AD-67990.1 | A-136212.1 | CCUGCUGCUGAUCCAGCCU | 746 | A-136213.1 | AGGCUGGAUCAGCAGCAGG | 943 | 1530-1548_as |
| AD-67991.1 | A-136214.1 | AUCCAGCCUCACUAUGCCU | 747 | A-136215.1 | AGGCAUAGUGAGGCUGGAU | 944 | 1540-1558_as |
| AD-67992.1 | A-136216.1 | UAUGCCUCUGACCUGGACA | 748 | A-136217.1 | UGUCCAGGUCAGAGGCAUA | 945 | 1552-1570_as |
| AD-67993.1 | A-136218.1 | ACCUGGACAAGGUGGAGGA | 749 | A-136219.1 | UCCUCCACCUUGUCCAGGU | 946 | 1562- |
| | | | | | | | 1580_G19A_as |
| AD-67994.1 | A-136220.1 | UGGAGGGUCUCACUUUCCA | 750 | A-136221.1 | UGGAAAGUGAGACCCUCCA | 947 | 1574-1592_as |
| AD-67995.1 | A-136222.1 | CACUUUCCAGCAAAACUCA | 751 | A-136223.1 | UGAGUUUUGCUGGAAAGUG | 948 | 1584-1602 |
| AD-67996.1 | A-136224.1 | AAAACUCCCUCAACUGGAU | 752 | A-136225.1 | AUCCAGUUGAGGGAGUUUU | 949 | 1595-1613_as |
| AD-67997.1 | A-136226.1 | AACUGGAUGAAGAAACUAU | 753 | A-136227.1 | AUAGUUUCUUCAUCCAGUU | 950 | 1606-1624_as |
| AD-67998.1 | A-136228.1 | AAACUAUCUCCCCGGACCA | 754 | A-136229.1 | UGGUCCGGGGAGAUAGUUU | 951 | 1618-1636_as |
| AD-67999.1 | A-136230.1 | CCGGACCAUCCACCUGACA | 755 | A-136231.1 | UGUCAGGUGGAUGGUCCGG | 952 | 1629-1647 |
| AD-68001.1 | A-136234.1 | UGCCCCAACUGGUGCUGCA | 756 | A-136235.1 | UGCAGCACCAGUUGGGGCA | 953 | 1649-1667_as |
| AD-68002.1 | A-136236.1 | UGCUGCAAGGAUCUUAUGA | 757 | A-136237.1 | UCAUAAGAUCCUUGCAGCA | 954 | 1661-1679_as |
| AD-68003.1 | A-136238.1 | UCUUAUGACCUGCAGGACA | 758 | A-136239.1 | UGUCCUGCAGGUCAUAAGA | 955 | 1672-1690 |
| AD-68004.1 | A-136240.1 | UGCAGGACCUGCUCGCCCA | 759 | A-136241.1 | UGGGCGAGCAGGUCCUGCA | 956 | 1682-1700_as |
| AD-68005.1 | A-136242.1 | UCGCCCAGGCUGAGCUGCA | 760 | A-136243.1 | UGCAGCUCAGCCUGGGCGA | 957 | 1694-1712 |
| AD-68006.1 | A-136244.1 | UGAGCUGCCCGCCAUUCUA | 761 | A-136245.1 | UAGAAUGGCGGGCAGCUCA | 958 | 1704- |
| | | | | | | | 1722_G19A_as |
| AD-68009.1 | A-136250.1 | UGCAAAAAUUGAGCAAUGA | 762 | A-136251.1 | UCAUUGCUCAAUUUUUGCA | 959 | 1739-1757_as |
| AD-68010.1 | A-136252.1 | AGCAAUGACCGCAUCAGGA | 763 | A-136253.1 | UCCUGAUGCGGUCAUUGCU | 960 | 1750- |
| | | | | | | | 1768_G19A_as |
| AD-68011.1 | A-136254.1 | CAUCAGGGUGGGGGAGGUA | 764 | A-136255.1 | UACCUCCCCCACCCUGAUG | 961 | 1761- |
| | | | | | | | 1779_G19A_as |
| AD-68012.1 | A-136256.1 | GGGGAGGUGCUGAACAGCA | 765 | A-136257.1 | UGCUGUUCAGCACCUCCCC | 962 | 1771-1789_as |
| AD-68013.1 | A-136258.1 | AACAGCAUUUUUUUUGAGA | 766 | A-136259.1 | UCUCAAAAAAAAUGCUGUU | 963 | 1783-1801 |
| AD-68014.1 | A-136260.1 | UUUUUGAGCUUGAAGCGGA | 767 | A-136261.1 | UCCGCUUCAAGCUCAAAAA | 964 | 1793-1811_as |
| AD-68017.1 | A-136266.1 | AGAGUCUACCCAACAGCUU | 768 | A-136267.1 | AAGCUGUUGGGUAGACUCU | 965 | 1827-1845_as |
| AD-68018.1 | A-136268.1 | CAACAGCUUAACAAGCCUA | 769 | A-136269.1 | UAGGCUUGUUAAGCUGUUG | 966 | 1837- |
| | | | | | | | 1855_G19A_as |
| AD-68019.1 | A-136270.1 | CAAGCCUGAGGUCUUGGAA | 770 | A-136271.1 | UUCCAAGACCUCAGGCUUG | 967 | 1848- |
| | | | | | | | 1866_G19A_as |
| AD-68020.1 | A-136272.1 | CUUGGAGGUGACCCUGAAA | 771 | A-136273.1 | UUUCAGGGUCACCUCCAAG | 968 | 1860-1878 |
| AD-68021.1 | A-136274.1 | ACCCUGAACCGCCCAUUCA | 772 | A-136275.1 | UGAAUGGGCGGUUCAGGGU | 969 | 1870-1888 |
| AD-68022.1 | A-136276.1 | GCCCAUUCCUGUUUGCUGU | 773 | A-136277.1 | ACAGCAAACAGGAAUGGGC | 970 | 1880-1898_as |
| AD-68025.1 | A-136284.1 | CACUUCCUGGGCCGCGUGA | 774 | A-136285.1 | UCACGCGGCCCAGGAAGUG | 971 | 1924- |
| | | | | | | | 1942_G19A_as |
| AD-68026.1 | A-136286.1 | CGCGUGGCCAACCCGCUGA | 775 | A-136287.1 | UCAGCGGGUUGGCCACGCG | 972 | 1936-1954_as |
| AD-68027.1 | A-136288.1 | ACCCGCUGAGCACAGCAUA | 776 | A-136289.1 | UAUGCUGUGCUCAGCGGGU | 973 | 1946- |
| | | | | | | | 1964_G19A_as |
| AD-68028.1 | A-136290.1 | ACAGCAUGAGGCCAGGGCA | 777 | A-136291.1 | UGCCCUGGCCUCAUGCUGU | 974 | 1957-1975 |
| AD-68029.1 | A-136292.1 | CAGGGCCCCAGAACACAGU | 778 | A-136293.1 | ACUGUGUUCUGGGGCCCUG | 975 | 1969-1987_as |
| AD-68032.1 | A-136298.1 | UCUGCCCCUGGCCUUUGAA | 779 | A-136299.1 | UUCAAAGGCCAGGGGCAGA | 976 | 2001- |
| | | | | | | | 2019_G19A_as |
| AD-68033.1 | A-136300.1 | UUUGAGGCAAAGGCCAGCA | 780 | A-136301.1 | UGCUGGCCUUUGCCUCAAA | 977 | 2014-2032_as |
| AD-68034.1 | A-136302.1 | AGGCCAGCAGCAGAUAACA | 781 | A-136303.1 | UGUUAUCUGCUGCUGGCCU | 978 | 2024-2042_as |
| AD-68035.1 | A-136304.1 | AGAUAACAACCCCGGACAA | 782 | A-136305.1 | UUGUCCGGGGUUGUUAUCU | 979 | 2035-2053_as |
| AD-68036.1 | A-136306.1 | CCGGACAAAUCAGCGAUGU | 783 | A-136307.1 | ACAUCGCUGAUUUGUCCGG | 980 | 2046-2064_as |
| AD-68037.1 | A-136308.1 | AGCGAUGUGUCACCCCCAA | 784 | A-136309.1 | UUGGGGGUGACACAUCGCU | 981 | 2057- |
| | | | | | | | 2075_G19A_as |
| AD-68084.2 | A-136314.1 | UUCUAAUGAGUCGACUUUA | 785 | A-136315.1 | UAAAGUCGACUCAUUAGAA | 982 | 2090- |
| | | | | | | | 2108_G19A_as |
| AD-68085.2 | A-136320.1 | GUUUCUCCUUGGUCUAAGU | 786 | A-136321.1 | ACUUAGACCAAGGAGAAAC | 983 | 2124-2142_as |
| AD-68086.2 | A-136328.1 | AGCCUGCAGCGGCACAAAU | 787 | A-136329.1 | AUUUGUGCCGCUGCAGGCU | 984 | 2167-2185_as |
| AD-68087.2 | A-136330.1 | CACAAAUGCACCUCCCAGU | 788 | A-136331.1 | ACUGGGAGGUGCAUUUGUG | 985 | 2179-2197_as |
| AD-68088.2 | A-136332.1 | ACCUCCCAGUUUGCUGGGU | 789 | A-136333.1 | ACCCAGCAAACUGGGAGGU | 986 | 2188-2206_as |
| AD-68089.2 | A-136334.1 | UGCUGGGUUUAUUUUAGAA | 790 | A-136335.1 | UUCUAAAAUAAACCCAGCA | 987 | 2199- |
| | | | | | | | 2217_G19A_as |
| AD-68090.2 | A-136340.1 | CAAGAACCAGUGUUUAGCA | 791 | A-136341.1 | UGCUAAACACUGGUUCUUG | 988 | 2234- |
| | | | | | | | 2252_G19A_as |
| AD-68091.2 | A-136354.1 | AGUGUUCCCUUUUCAAGUU | 792 | A-136355.1 | AACUUGAAAAGGGAACACU | 989 | 2309-2327_as |
| AD-68092.2 | A-136356.1 | UUCAAGUUGAGAACAAAAA | 793 | A-136357.1 | UUUUUGUUCUCAACUUGAA | 990 | 2320-2338_as |
| AD-68093.2 | A-136358.1 | CAAAAAUUGGGUUUUAAAA | 794 | A-136359.1 | UUUUAAAACCCAAUUUUUG | 991 | 2333-2351_as |
| AD-68094.2 | A-136362.1 | AAAGUAUACAUUUUUGCAU | 795 | A-136363.1 | AUGCAAAAAUGUAUACUUU | 992 | 2354-2372_as |
| AD-68095.2 | A-136368.1 | UUUAGUGUCUUGAAUGUAA | 796 | A-136369.1 | UUACAUUCAAGACACUAAA | 993 | 2388-2406_as |
| AD-68096.2 | A-136370.1 | GAAUGUAAGAACAUGACCU | 797 | A-136371.1 | AGGUCAUGUUCUUACAUUC | 994 | 2399-2417_as |
| AD-68097.2 | A-136374.1 | UGUAGUGUCUGUAAUACCU | 798 | A-136375.1 | AGGUAUUACAGACACUACA | 995 | 2421-2439_as |
| AD-68098.2 | A-136376.1 | UGUAAUACCUUAGUUUUUU | 799 | A-136377.1 | AAAAAACUAAGGUAUUACA | 996 | 2430-2448_as |
| AD-68099.2 | A-136378.1 | UUUUUUCCACAGAUGCUUA | 800 | A-136379.1 | UAAGCAUCUGUGGAAAAAA | 997 | 2443- |
| | | | | | | | 2461_G19A_as |
| AD-68100.2 | A-136382.1 | UUUUUGAACAAUACGUGAA | 801 | A-136383.1 | UUCACGUAUUGUUCAAAAA | 998 | 2465-2483_as |
| AD-68101.2 | A-136392.1 | ACCAUAGCUGGUUAUUUCU | 802 | A-136393.1 | AGAAAUAACCAGCUAUGGU | 999 | 2519-2537_as |
| AD-68102.2 | A-136394.1 | UUAUUUCUCCCUUGUGUUA | 803 | A-136395.1 | UAACACAAGGGAGAAAUAA | 1000 | 2530-2548_as |
| AD-68116.1 | A-136312.1 | UCCCACCUUUUCUUCUAAU | 804 | A-136313.1 | AUUAGAAGAAAAGGUGGGA | 1001 | 2078-2096_as |
| AD-68117.1 | A-136316.1 | UCGACUUUGAGCUGGAAAG | 805 | A-136317.1 | CUUUCCAGCUCAAAGUCGA | 1002 | 2100-2118_as |
| AD-68118.1 | A-136318.1 | CUGGAAAGCAGCCGUUUCU | 806 | A-136319.1 | AGAAACGGCUGCUUUCCAG | 1003 | 2111-2129_as |
| AD-68119.1 | A-136322.1 | UGGUCUAAGUGUGCUGCAU | 807 | A-136323.1 | AUGCAGCACACUUAGACCA | 1004 | 2133-2151_as |
| AD-68120.1 | A-136324.1 | GCUGCAUGGAGUGAGCAGU | 808 | A-136325.1 | ACUGCUCACUCCAUGCAGC | 1005 | 2145-2163_as |
| AD-68121.1 | A-136326.1 | UGAGCAGUAGAAGCCUGCA | 809 | A-136327.1 | UGCAGGCUUCUACUGCUCA | 1006 | 2156-2174_as |
| AD-68122.1 | A-136336.1 | UUAGAGAAUGGGGGUGGGA | 810 | A-136337.1 | UCCCACCCCCAUUCUCUAA | 1007 | 2212- |
| | | | | | | | 2230_G19A_as |
| AD-68123.1 | A-136338.1 | GGGUGGGGAGGCAAGAACA | 811 | A-136339.1 | UGUUCUUGCCUCCCCACCC | 1008 | 2223-2241 |
| AD-68124.1 | A-136342.1 | UGUUUAGCGCGGGACUACU | 812 | A-136343.1 | AGUAGUCCCGCGCUAAACA | 1009 | 2244-2262_as |
| AD-68125.1 | A-136344.1 | GGACUACUGUUCCAAAAAG | 813 | A-136345.1 | CUUUUUGGAACAGUAGUCC | 1010 | 2255-2273_as |
| AD-68126.1 | A-136350.1 | AGCUUGUUUGUGAAACAAA | 814 | A-136351.1 | UUUGUUUCACAAACAAGCU | 1011 | 2288-2306_as |
| AD-68127.1 | A-136352.1 | AAACAAAAAAGUGUUCCCU | 815 | A-136353.1 | AGGGAACACUUUUUUGUUU | 1012 | 2300-2318_as |
| AD-68128.1 | A-136360.1 | UUUUAAAAUUAAAGUAUAA | 816 | A-136361.1 | UUAUACUUUAAUUUUAAAA | 1013 | 2344-2362 |
| AD-68129.1 | A-136364.1 | UUUUGCAUUGCCUUCGGUU | 817 | A-136365.1 | AACCGAAGGCAAUGCAAAA | 1014 | 2365-2383_as |
| AD-68130.1 | A-136366.1 | UUCGGUUUGUAUUUAGUGU | 818 | A-136367.1 | ACACUAAAUACAAACCGAA | 1015 | 2377-2395_as |
| AD-68131.1 | A-136372.1 | AACAUGACCUCCGUGUAGU | 819 | A-136373.1 | ACUACACGGAGGUCAUGUU | 1016 | 2408-2426_as |
| AD-68132.1 | A-136380.1 | CAGAUGCUUGUGAUUUUUA | 820 | A-136381.1 | UAAAAAUCACAAGCAUCUG | 1017 | 2452- |
| | | | | | | | 2470_G19A_as |
| AD-68133.1 | A-136384.1 | UACGUGAAAGAUGCAAGCA | 821 | A-136385.1 | UGCUUGCAUCUUUCACGUA | 1018 | 2476-2494_as |
| AD-68134.1 | A-136386.1 | UGCAAGCACCUGAAUUUCU | 822 | A-136387.1 | AGAAAUUCAGGUGCUUGCA | 1019 | 2487-2505_as |
| AD-68135.1 | A-136388.1 | GAAUUUCUGUUUGAAUGCA | 823 | A-136389.1 | UGCAUUCAAACAGAAAUUC | 1020 | 2498- |
| | | | | | | | 2516_G19A_as |
| AD-68136.1 | A-136390.1 | UUUGAAUGCGGAACCAUAA | 824 | A-136391.1 | UUAUGGUUCCGCAUUCAAA | 1021 | 2507- |
| | | | | | | | 2525_G19A_as |
| AD-68137.1 | A-136396.1 | UUGUGUUAGUAAUAAACGU | 825 | A-136397.1 | ACGUUUAUUACUAACACAA | 1022 | 2541-2559_as |
| AD-68138.1 | A-136398.1 | AUAAACGUCUUGCCACAAU | 826 | A-136399.1 | AUUGUGGCAAGACGUUUAU | 1023 | 2552-2570_as |
| AD-68139.1 | A-136400.1 | UGCCACAAUAAGCCUCCAA | 827 | A-136401.1 | UUGGAGGCUUAUUGUGGCA | 1024 | 2562-2580_as |

TABLE 12
AGT single dose screen in Hep3B cells (21/23 mers)

| | 10 nM | 10 nM | 0.1 nM | 0.1 nM |
|---|---|---|---|---|
| Duplex Name | Avg | SD | Avg | SD |
| AD-67864.1 | 86.08 | 0.42 | 100.66 | 4.93 |
| AD-67865.1 | 90.98 | 0.44 | 97.56 | 4.30 |
| AD-67866.1 | 107.85 | 3.17 | 108.20 | 1.59 |
| AD-67867.1 | 96.24 | 5.18 | 96.22 | 4.24 |
| AD-67868.1 | 92.25 | 0.45 | 93.87 | 0.92 |
| AD-67869.1 | 107.24 | 8.40 | 96.54 | 3.78 |
| AD-67870.1 | 89.43 | 1.75 | 96.84 | 0.47 |
| AD-67871.1 | 100.66 | 4.93 | 96.91 | 5.22 |
| AD-67872.1 | 92.27 | 2.26 | 87.75 | 7.73 |
| AD-67873.1 | 118.49 | 6.38 | 105.63 | 3.10 |
| AD-67874.1 | 98.36 | 8.18 | 99.57 | 1.46 |
| AD-67875.1 | 98.55 | 2.89 | 100.76 | 14.27 |
| AD-67876.1 | 98.951 | 5.33 | 105.24 | 0.51 |
| AD-67877.1 | 104.94 | 5.14 | 100.97 | 2.47 |
| AD-67878.1 | 101.79 | 7.47 | 100.61 | 0.98 |
| AD-67879.1 | 99.66 | 6.34 | 101.66 | 0.49 |
| AD-67880.1 | 99.23 | 1.94 | 93.79 | 9.63 |
| AD-67881.1 | 95.84 | 0.93 | 104.16 | 2.04 |
| AD-67882.1 | 97.52 | 1.43 | 98.09 | 9.60 |
| AD-67883.1 | 94.53 | 1.85 | 95.88 | 3.75 |
| AD-67884.1 | 110.16 | 5.39 | 105.25 | 1.54 |
| AD-67885.1 | 101.70 | 4.48 | 97.94 | 5.75 |
| AD-67886.1 | 107.09 | 2.09 | 102.03 | 3.00 |
| AD-67887.1 | 95.51 | 0.46 | 94.24 | 4.15 |
| AD-67888.1 | 105.98 | 1.55 | 101.03 | 5.44 |
| AD-67889.1 | 89.42 | 0.87 | 102.44 | 5.52 |
| AD-67890.1 | 96.51 | 0.94 | 99.34 | 6.81 |
| AD-67891.1 | 89.73 | 0.43 | 102.01 | 0.99 |
| AD-67892.1 | 85.81 | 3.36 | 91.97 | 3.60 |
| AD-67893.1 | 104.89 | 2.05 | 93.25 | 3.65 |
| AD-67894.1 | 95.95 | 6.57 | 100.61 | 0.98 |
| AD-67895.1 | 87.61 | 3.43 | 92.99 | 5.92 |
| AD-67896.1 | 102.36 | 0.50 | 102.37 | 1.50 |
| AD-67897.1 | 89.23 | 6.55 | 101.66 | 1.49 |
| AD-67898.1 | 87.68 | 6.01 | 97.89 | 3.83 |
| AD-67899.1 | 10.98 | 1.28 | 28.08 | 7.87 |
| AD-67900.1 | 16.91 | 2.47 | 42.49 | 5.81 |
| AD-67901.1 | 51.36 | 1.00 | 73.53 | 10.77 |
| AD-67902.1 | 32.91 | 6.25 | 49.54 | 4.60 |
| AD-67903.1 | 8.23 | 3.73 | 25.89 | 8.71 |
| AD-67904.1 | 76.02 | 3.35 | 92.35 | 5.88 |
| AD-67905.1 | 99.22 | 0.97 | 103.21 | 7.58 |
| AD-67906.1 | 12.68 | 6.52 | 31.29 | 0.76 |
| AD-67907.1 | 25.24 | 0.86 | 68.71 | 0.67 |
| AD-67908.1 | 15.32 | 6.82 | 41.71 | 0.40 |
| AD-67909.1 | 57.21 | 2.52 | 81.72 | 1.60 |
| AD-67910.1 | 11.66 | 3.10 | 54.68 | 6.68 |
| AD-67911.1 | 40.57 | 0.39 | 60.72 | 4.16 |
| AD-67912.1 | 21.45 | 0.84 | 50.16 | 2.70 |
| AD-67913.1 | 44.86 | 5.26 | 69.55 | 5.78 |
| AD-67914.1 | 13.41 | 4.82 | 14.58 | 2.84 |
| AD-67915.1 | 38.73 | 3.41 | 62.81 | 7.67 |
| AD-67916.1 | 5.21 | 2.70 | 19.28 | 6.84 |
| AD-67917.1 | 16.92 | 1.57 | 50.03 | 3.91 |
| AD-67918.1 | 52.71 | 4.38 | 95.29 | 6.53 |
| AD-67919.1 | 86.98 | 0.85 | 96.94 | 6.17 |
| AD-67920.1 | 28.31 | 8.20 | 62.46 | 8.84 |
| AD-67921.1 | 40.44 | 1.38 | 65.06 | 20.38 |
| AD-67922.1 | 37.99 | 0.93 | 68.09 | 5.00 |
| AD-67923.1 | 9.52 | 0.97 | 31.95 | 1.09 |
| AD-67924.1 | 20.28 | 2.28 | 53.38 | 6.78 |
| AD-67925.1 | 15.78 | 1.46 | 35.24 | 4.82 |
| AD-67926.1 | 12.85 | 0.88 | 28.20 | 0.41 |
| AD-67927.1 | 39.78 | 2.72 | 70.72 | 17.16 |
| AD-67928.1 | 48.92 | 8.11 | 76.56 | 4.12 |
| AD-67929.1 | 95.53 | 3.27 | 103.52 | 6.08 |
| AD-67930.1 | 7.70 | 3.25 | 38.13 | 1.12 |
| AD-67931.1 | 62.59 | 2.14 | 83.32 | 7.74 |
| AD-67932.1 | 12.85 | 4.97 | 48.21 | 4.95 |
| AD-67933.1 | 75.51 | 4.06 | 99.92 | 1.95 |
| AD-67934.1 | 95.55 | 4.21 | 95.85 | 1.87 |
| AD-67935.1 | 6.92 | 0.06 | 26.43 | 22.43 |
| AD-67936.1 | 30.62 | 3.29 | 64.66 | 5.06 |
| AD-67937.1 | 11.89 | 1.33 | 46.23 | 25.91 |
| AD-67938.1 | 84.08 | 4.94 | 94.19 | 0.46 |
| AD-67939.1 | 49.09 | 0.24 | 76.31 | 13.39 |
| AD-67940.1 | 77.85 | 0.76 | 90.12 | 5.29 |
| AD-67947.1 | 81.74 | 5.60 | 89.68 | 3.07 |
| AD-67948.1 | 57.40 | 3.93 | 75.94 | 12.96 |
| AD-67949.1 | 89.04 | 1.30 | 98.84 | 4.35 |
| AD-67950.1 | 30.38 | 6.93 | 50.01 | 4.40 |
| AD-67951.1 | 57.60 | 12.32 | 84.26 | 2.89 |
| AD-67952.1 | 30.08 | 9.84 | 71.83 | 1.76 |
| AD-67954.1 | 63.41 | 2.17 | 83.16 | 5.29 |
| AD-67955.1 | 66.78 | 1.30 | 88.74 | 2.60 |
| AD-67956.1 | 48.82 | 4.54 | 84.38 | 7.02 |
| AD-67957.1 | 66.79 | 1.96 | 96.46 | 3.78 |
| AD-67958.1 | 11.88 | 6.31 | 28.49 | 7.58 |
| AD-67959.1 | 50.08 | 5.87 | 78.05 | 1.14 |
| AD-67960.1 | 53.33 | 9.104 | 72.41 | 9.90 |
| AD-67962.1 | 17.29 | 5.41 | 54.30 | 13.17 |
| AD-67963.1 | 19.63 | 2.11 | 49.27 | 15.43 |
| AD-67964.1 | 14.83 | 0.14 | 46.79 | 6.40 |
| AD-67965.1 | 15.94 | 9.26 | 36.16 | 16.09 |
| AD-67966.1 | 41.84 | 9.95 | 80.28 | 3.54 |
| AD-67967.1 | 20.10 | 2.94 | 45.85 | 6.71 |
| AD-67968.1 | 24.10 | 0.47 | 45.77 | 0.22 |
| AD-67970.1 | 41.61 | 6.09 | 59.36 | 1.16 |
| AD-67971.1 | 92.20 | 3.16 | 97.48 | 4.29 |
| AD-67972.1 | 24.48 | 3.46 | 60.84 | 2.68 |
| AD-67973.1 | 67.49 | 2.31 | 93.19 | 4.56 |
| AD-67974.1 | 22.421 | 0.76 | 62.87 | 17.33 |
| AD-67975.1 | 20.05 | 2.157 | 52.74 | 5.93 |
| AD-67976.1 | 19.21 | 5.30 | 54.84 | 6.96 |
| AD-67978.1 | 17.36 | 1.10 | 60.49 | 14.96 |
| AD-67979.1 | 104.18 | 7.14 | 104.08 | 3.06 |
| AD-67980.1 | 17.85 | 4.84 | 43.65 | 9.34 |
| AD-67981.1 | 28.91 | 4.09 | 63.61 | 0.62 |
| AD-67982.1 | 91.54 | 0.44 | 103.34 | |
| AD-67983.1 | 76.45 | 1.87 | 97.09 | 0.95 |
| AD-67984.1 | 23.20 | 0.34 | 75.39 | 8.84 |
| AD-67986.1 | 10.16 | 2.32 | 43.00 | 0.21 |
| AD-67987.1 | 82.21 | 0.80 | 90.90 | 10.66 |
| AD-67988.1 | 22.56 | 7.80 | 59.12 | 9.52 |
| AD-67989.1 | 34.16 | 10.22 | 67.14 | 9.83 |
| AD-67990.1 | 24.33 | 3.68 | 36.35 | 3.20 |
| AD-67991.1 | 81.13 | 3.97 | 100.55 | 3.94 |
| AD-67992.1 | 56.20 | 3.30 | 97.78 | 1.91 |
| AD-67993.1 | 29.38 | 5.01 | 78.86 | 13.08 |
| AD-67994.1 | 20.30 | 4.44 | 30.93 | |
| AD-67995.1 | 13.97 | 2.72 | 37.27 | 5.82 |
| AD-67996.1 | 14.48 | 0.49 | 30.62 | 6.25 |
| AD-67997.1 | 35.60 | 7.78 | 70.86 | 12.09 |
| AD-67998.1 | 29.38 | 5.01 | 62.37 | 15.13 |
| AD-67999.1 | 58.52 | 6.58 | 86.27 | 9.70 |
| AD-68001.1 | 39.90 | 11.75 | 68.76 | 5.38 |
| AD-68002.1 | 70.36 | 2.41 | 87.50 | 1.61 |
| AD-68003.1 | 31.65 | 2.78 | 86.01 | 2.10 |
| AD-68004.1 | 23.47 | 1.60 | 42.71 | 1.04 |
| AD-68005.1 | 30.41 | 6.21 | 68.42 | 1.00 |
| AD-68006.1 | 20.44 | 8.64 | 41.45 | 5.87 |
| AD-68009.1 | 26.59 | 6.45 | 50.87 | 12.58 |
| AD-68010.1 | 18.01 | 2.98 | 41.65 | 11.68 |
| AD-68011.1 | 48.64 | 4.28 | 75.01 | 10.99 |
| AD-68012.1 | 21.28 | 0.41 | 66.82 | 13.98 |
| AD-68013.1 | 101.46 | 9.93 | 109.28 | 4.28 |
| AD-68014.1 | 43.62 | 7.44 | 71.82 | 0.35 |
| AD-68017.1 | 16.05 | 11.61 | 38.14 | 14.23 |
| AD-68018.1 | 14.74 | 0.57 | 62.02 | 9.38 |
| AD-68019.1 | 20.85 | 3.66 | 84.24 | 1.23 |
| AD-68020.1 | 31.12 | 4.86 | 70.58 | 16.45 |
| AD-68021.1 | 18.98 | 3.8 | 56.30 | 10.96 |
| AD-68022.1 | 16.41 | 9.93 | 27.87 | 15.96 |
| AD-68025.1 | 86.91 | 1.70 | 99.51 | 3.41 |
| AD-68026.1 | 26.43 | 9.50 | 73.34 | 1.79 |
| AD-68027.1 | 39.43 | 0.38 | 72.57 | 1.42 |
| AD-68028.1 | 56.98 | 3.34 | 80.52 | |
| AD-68029.1 | 49.97 | 3.42 | 85.43 | 2.93 |
| AD-68032.1 | 71.12 | 3.48 | 91.96 | 6.30 |
| AD-68033.1 | 102.29 | 2.50 | 99.13 | 0.97 |
| AD-68034.1 | 15.54 | 3.32 | 32.03 | 3.91 |
| AD-68035.1 | 19.40 | 6.88 | 49.77 | 6.32 |
| AD-68036.1 | 16.23 | 8.62 | 29.22 | 4.28 |
| AD-68037.1 | 20.40 | 5.24 | 49.31 | 9.13 |
| AD-68084.2 | 15.14 | 3.24 | 42.67 | 5.63 |
| AD-68085.2 | 17.11 | 5.52 | 30.76 | 11.20 |
| AD-68086.2 | 8.96 | 0 | 21.05 | 2.98 |
| AD-68087.2 | 22.54 | 14.44 | 26.79 | 37.89 |
| AD-68088.2 | 34.54 | 2.19 | 76.58 | 1.87 |
| AD-68089.2 | 27.02 | 5.91 | 59.45 | 13.85 |
| AD-68090.2 | 19.90 | 0.97 | 35.94 | 7.00 |
| AD-68091.2 | 15.18 | 0.74 | 32.19 | 3.77 |
| AD-68092.2 | 13.21 | 0.25 | 40.48 | 1.38 |
| AD-68093.2 | 13.94 | 3.11 | 52.91 | 25.17 |
| AD-68094.2 | 48.22 | 7.06 | 89.18 | 25.43 |
| AD-68095.2 | 83.02 | 5.69 | 81.51 | 1.19 |
| AD-68096.2 | 74.34 | 5.82 | 75.78 | 1.21 |
| AD-68097.2 | 88.32 | 4.32 | 86.30 | 7.18 |
| AD-68098.2 | 69.49 | 0.34 | 69.49 | 1.02 |
| AD-68099.2 | 95.96 | 3.76 | 51.05 | 72.19 |
| AD-68100.2 | 81.51 | 1.19 | 92.05 | 3.60 |
| AD-68101.2 | 76.34 | 2.99 | 74.83 | 5.13 |
| AD-68102.2 | 71.02 | 4.52 | 76.99 | 6.78 |
| AD-68116.1 | 9.94 | 0.38 | 31.41 | 3.53 |
| AD-68117.1 | 18.24 | 0.62 | 51.01 | 7.96 |
| AD-68118.1 | 16.61 | 0.32 | 31.54 | 7.50 |
| AD-68119.1 | 48.03 | 3.76 | 77.61 | 12.49 |
| AD-68120.1 | 20.17 | 11.80 | 72.58 | 10.63 |
| AD-68121.1 | 16.25 | 4.55 | 57.64 | 25.65 |
| AD-68122.1 | 57.36 | 5.33 | 97.32 | 4.76 |
| AD-68123.1 | 15.84 | 1.24 | 45.55 | 2.00 |
| AD-68124.1 | 24.62 | 8.40 | 51.57 | 19.72 |
| AD-68125.1 | 18.71 | 9.38 | 35.98 | 6.14 |
| AD-68126.1 | 13.13 | 6.42 | 47.97 | 1.41 |
| AD-68127.1 | 41.04 | 12.66 | 85.58 | 2.93 |
| AD-68128.1 | 62.20 | 16.27 | 107.38 | 9.46 |
| AD-68129.1 | 79.00 | | 81.25 | 3.18 |
| AD-68130.1 | 72.97 | 2.50 | 88.00 | 3.88 |
| AD-68131.1 | 134.88 | 9.24 | 92.09 | 5.41 |
| AD-68132.1 | 81.05 | 5.95 | 89.85 | 3.96 |
| AD-68133.1 | 85.28 | 2.50 | 104.25 | 2.04 |
| AD-68134.1 | 62.63 | 0.92 | 83.94 | 6.98 |
| AD-68135.1 | 72.95 | 0.35 | 79.05 | 3.87 |
| AD-68136.1 | 74.86 | 10.60 | 88.88 | |
| AD-68137.1 | 85.08 | 6.24 | 90.50 | 4.87 |
| AD-68138.1 | 76.05 | 1.11 | 76.34 | 2.99 |
| AD-68139.1 | 102.25 | 8.01 | 99.42 | 6.81 |

### Example 4: In Vivo AGT Silencing in a Mouse Expressing hAGT

[0701] A series of experiments were performed to assess hAGT target knockdown in mice expressing human AGT (hAGT) from an AAV8 expression vector which has strong liver tropism. Briefly, mice were infected with 1×10¹¹ AAV8 particles containing an expression construct for hAGT under the control of a constitutive promoter. Two weeks after infection, mice were administered a single 3.0 mg/kg, 1.0 mg/kg, 0.3 mg/kg, or 0.1 mg/kg dose of an siRNA targeting hAGT (AD-67327.2 or AD-67335.2), or PBS as a control (n=4 per group). The nucleotide sequences of the agents assessed in these experiments are provided in Table 13.

TABLE 13
Modified Sense and Antisense Strand Sequences of AGT dsRNAs (21/23 mers)

| | | Sense Strand/ | | SEQ | |
|---|---|---|---|---|---|
| Duplex | Location on | Antisense | Sense Sequence/Antisense | ID | Parent |
| Name | NM_000029.3 | Strand | Sequence | NO. | Duplex |
| AD-67327 | 2081-2101 | A-134527 | uscsucccAfcCfUfUfuucuucuaauL96 | 1025 | AD-60784 |
| | 2079-2101 | A-134528 | asUfsuagAfagaaaagGfuGfggagascsu | 1026 | |
| AD-67335 | 1894-1914 | A-134536 | usgsuuugCfuGfUfGfuaugaucaaaL96 | 1027 | AD-60781 |
| | 1892-1914 | A-134538 | usUfsugaUfcAfUfacacAfgCfaaacasgsg | 1028 | |

[0702] At days 0, 3, 7, and 14, after administration of the agents, blood samples were collected and serum was prepared to determine the level of hAGT mRNA expression relative to the prebleed level of hAGT. The results of these experiments are shown in Table 14.

TABLE 14
hAGT single dose dose-response screen in hAGT expressing mice

| | Dose | Day 0 | | Day 3 | | Day 7 | | Day 14 | |
|---|---|---|---|---|---|---|---|---|---|
| Duplex | mpk | Avg | SD | Avg | SD | Avg | SD | Avg | SD |
| | PBS | 1.00 | 0.00 | 1.29 | 0.28 | 0.91 | 0.17 | 0.65 | 0.05 |
| AD- | 3 | 1.00 | 0.00 | 0.42 | 0.09 | 0.16 | 0.04 | 0.11 | 0.04 |
| 67327 | 1 | 1.00 | 0.00 | 0.63 | 0.05 | 0.44 | 0.04 | 0.31 | 0.06 |
| | 0.3 | 1.00 | 0.00 | 1.04 | 0.13 | 0.90 | 0.12 | 0.77 | 0.06 |
| | 0.1 | 1.00 | 0.00 | 0.91 | 0.06 | 0.88 | 0.07 | 0.74 | 0.15 |
| AD- | 3 | 1.00 | 0.00 | 0.58 | 0.14 | 0.42 | 0.13 | 0.37 | 0.10 |
| 67335 | 1 | 1.00 | 0.00 | 0.59 | 0.41 | 0.64 | 0.03 | 0.56 | 0.12 |
| | 0.3 | 1.00 | 0.00 | 1.06 | 0.28 | 0.81 | 0.14 | 0.80 | 0.07 |
| | 0.1 | 1.00 | 0.00 | 1.18 | 0.18 | 1.02 | 0.10 | 0.85 | 0.08 |

### Example 5: In Vivo AGT Silencing in a Mouse Expressing hAGT

[0703] A series of experiments were performed to assess hAGT target knockdown in mice expressing hAGT from an AAV8 expression vector which has a strong liver tropism. Briefly, mice were infected with 1×10¹¹ AAV8 particles containing an expression construct for hAGT under the control of a constitutive promoter. Two weeks after infection with the AAV8 virus, mice were administered a single 1 mg/kg dose of an siRNA targeting hAGT, or PBS as a control (n=3 per group). The nucleotide sequences of the duplexes assessed in these experiments are provided in Table 15.

TABLE 15
Modified Sense and Antisense Strand Sequences of AGT dsRNAs (21/23 mers)

| | | Sense Strand/ | | SEQ | |
|---|---|---|---|---|---|
| Duplex | Location on | Antisense | Sense Sequence/Antisense | ID | Parent |
| Name | NM_000029.3 | Strand | Sequence | NO. | Duplex |
| AD-68577 | 855-875 | A-137778 | ususccguAfuAfUfAfuggcaugcaaL96 | 1029 | AD-60779 |
| | 853-875 | A-137779 | usUfsgcaUfgCfCfauauAfuAfcggaasgsc | 1030 | |
| AD-68581 | 1741-1761 | A-137784 | ascscugcAfaAfAfAfungagcaauaL96 | 1031 | AD-56029 |
| | 1739-1761 | A-137785 | usAfsuugCfuCfAfauunUfuGfcaggususc | 1032 | |
| AD-68582 | 1741-1761 | A-137784 | ascscugcAfaAfAfAfungagcaauaL96 | 1033 | AD-56029 |
| | 1739-1761 | A-137786 | usAfsuugCfucaauuuUfuGfcaggususc | 1034 | |
| AD-67335 | 1894-1914 | A-134536 | usgsuuugCfuGfUfGfuaugaucaaaL96 | 1035 | AD-60781 |
| | 1892-1914 | A-134538 | usUfsugaUfcAfUfacacAfgCfaaacasgsg | 1036 | |
| AD-67327 | 2081-2101 | A-134527 | uscsucccAfcCfUfUfuucuucuaauL96 | 1037 | AD-52474 |
| | 2079-2101 | A-134528 | asUfsuagAfagaaaagGfuGfggagascsu | 1038 | |
| AD-68575 | 2084-2104 | A-137775 | cscscaccUfuUfUfCfuucuaaugaaL96 | 1039 | AD-60777 |
| | 2082-2104 | A-137776 | usUfscauUfaGfAfagaaAfaGfgugggsasg | 1040 | |
| AD-68576 | 2084-2104 | A-137775 | cscscaccUfuUfUfCfuucuaaugaaL96 | 1041 | AD-60777 |
| | 2082-2104 | A-137777 | usUfscauUfagaagaaAfaGfgugggsasg | 1042 | |
| AD-68583 | 2291-2311 | A-137787 | cscsagcuUfgUfUfUfgugaaacaaaL96 | 1043 | AD-56019 |
| | 2289-2311 | A-137788 | usUfsuguUfuCfAfcaaaCfaAfgcuggsusc | 1044 | |
| AD-68584 | 2291-2311 | A-137787 | cscsagcuUfgUfUfUfgugaaacaaaL96 | 1045 | AD-56019 |
| | 2289-2311 | A-137789 | usUfsuguUfucacaaaCfaAfgcuggsusc | 1046 | |
| AD-67313 | 2309-2329 | A-134509 | asasaaaaGfuGfUfUfcccuuuucaaL96 | 1047 | AD-60776 |
| | 2307-2329 | A-134510 | usUfsgaaAfagggaacAfcUfuuuuusgsu | 1048 | |
| AD-67314 | 2309-2329 | A-134509 | asasaaaaGfuGfUfUfcccuuuucaaL96 | 1049 | AD-60776 |
| | 2307-2329 | A-134511 | usUfsgaaAfaGfGfgaacAfcUfuuuuusgsu | 1050 | |

[0704] Seven days after administration of the agents, blood samples were collected and serum was prepared to determine the level of hAGT mRNA expression relative to the prebleed level of hAGT. The results of these experiments are provided in Table 16.

TABLE 16
hAGT single dose dose-response screen in
hAGT expressing mice

| Duplex | Average | SD |
|---|---|---|
| PBS | 98.6 | 8.7 |
| AD-68577 | 65.1 | 7.7 |
| AD-68581 | 53.1 | 3.3 |
| AD-68582 | 44.8 | 11.1 |
| AD-67335 | 60.5 | 3.1 |
| AD-67327 | 43.0 | 1.0 |
| AD-68575 | 48.0 | 9.4 |
| AD-68576 | 47.4 | 5.9 |
| AD-68583 | 51.3 | 7.7 |
| AD-68584 | 61.0 | 2.1 |
| AD-67313 | 70.8 | 7.6 |
| AD-67314 | 66.2 | 5.7 |

### EQUIVALENTS

[0705] Those skilled in the art will recognize, or be able to ascertain using no more than routine experimentation, many equivalents to the specific embodiments and methods described herein. Such equivalents are intended to be encompassed by the scope of the following claims.

The application's sequence listing, which the Patent Office published only in electronic form, follows.

SEQUENCE LISTING (1052 sequences)

SEQ ID NO: 1 - DNA, 2587 bp, Homo sapiens
  source 1..2587: mol_type = genomic DNA
atcccatgagcgggcagcagggtcagaagtggcccccgtgttgcctaagcaagactctcccctgccctctgccctctgcacctccggcctgcatgtccctgtggcctcttgggggtacatctcccggggctgggtcagaaggcctgggtggttggcctcaggctgtcacacacctagggagatgctcccgtttctgggaaccttggccccgactcctgcaaacttcggtaaatgtgtaactcgaccctgcaccggctcactctgttcagcagtgaaactctgcatcgatcactaagacttcctggaagaggtcccagcgtgagtgtcgcttctggcatctgtccttctggccagcctgtggtctggccaagtgatgtaaccctcctctccagcctgtgcacaggcagcctgggaacagctccatccccacccctcagctataaatagggcatcgtgacccggccgggggaagaagctgccgttgttctgggtactacagcagaagggtatgcggaagcgagcaccccagtctgagatggctcctgccggtgtgagcctgagggccaccatcctctgcctcctggcctgggctggcctggctgcaggtgaccgggtgtacatacaccccttccacctcgtcatccacaatgagagtacctgtgagcagctggcaaaggccaatgccgggaagcccaaagaccccaccttcatacctgctccaattcaggccaagacatcccctgtggatgaaaaggccctacaggaccagctggtgctagtcgctgcaaaacttgacaccgaagacaagttgagggccgcaatggtcgggatgctggccaacttcttgggcttccgtatatatggcatgcacagtgagctatggggcgtggtccatggggccaccgtcctctccccaacggctgtctttggcaccctggcctctctctatctgggagccttggaccacacagctgacaggctacaggcaatcctgggtgttccttggaaggacaagaactgcacctcccggctggatgcgcacaaggtcctgtctgccctgcaggctgtacagggcctgctagtggcccagggcagggctgatagccaggcccagctgctgctgtccacggtggtgggcgtgttcacagccccaggcctgcacctgaagcagccgtttgtgcagggcctggctctctatacccctgtggtcctcccacgctctctggacttcacagaactggatgttgctgctgagaagattgacaggttcatgcaggctgtgacaggatggaagactggctgctccctgatgggagccagtgtggacagcaccctggctttcaacacctacgtccacttccaagggaagatgaagggcttctccctgctggccgagccccaggagttctgggtggacaacagcacctcagtgtctgttcccatgctctctggcatgggcaccttccagcactggagtgacatccaggacaacttctcggtgactcaagtgcccttcactgagagcgcctgcctgctgctgatccagcctcactatgcctctgacctggacaaggtggagggtctcactttccagcaaaactccctcaactggatgaagaaactatctccccggaccatccacctgaccatgccccaactggtgctgcaaggatcttatgacctgcaggacctgctcgcccaggctgagctgcccgccattctgcacaccgagctgaacctgcaaaaattgagcaatgaccgcatcagggtgggggaggtgctgaacagcattttttttgagcttgaagcggatgagagagagcccacagagtctacccaacagcttaacaagcctgaggtcttggaggtgaccctgaaccgcccattcctgtttgctgtgtatgatcaaagcgccactgccctgcacttcctgggccgcgtggccaacccgctgagcacagcatgaggccagggccccagaacacagtgcctggcaaggcctctgcccctggcctttgaggcaaaggccagcagcagataacaaccccggacaaatcagcgatgtgtcacccccagtctcccaccttttcttctaatgagtcgactttgagctggaaagcagccgtttctccttggtctaagtgtgctgcatggagtgagcagtagaagcctgcagcggcacaaatgcacctcccagtttgctgggtttattttagagaatgggggtggggaggcaagaaccagtgtttagcgcgggactactgttccaaaaagaattccaaccgaccagcttgtttgtgaaacaaaaaagtgttcccttttcaagttgagaacaaaaattgggttttaaaattaaagtatacatttttgcattgccttcggtttgtatttagtgtcttgaatgtaagaacatgacctccgtgtagtgtctgtaataccttagttttttccacagatgcttgtgatttttgaacaatacgtgaaagatgcaagcacctgaatttctgtttgaatgcggaaccatagctggttatttctcccttgtgttagtaataaacgtcttgccacaataagcctccaaaaaaaa

SEQ ID NO: 2 - DNA, 2587 bp, Homo sapiens
  source 1..2587: mol_type = genomic DNA
ttttttttggaggcttattgtggcaagacgtttattactaacacaagggagaaataaccagctatggttccgcattcaaacagaaattcaggtgcttgcatctttcacgtattgttcaaaaatcacaagcatctgtggaaaaaactaaggtattacagacactacacggaggtcatgttcttacattcaagacactaaatacaaaccgaaggcaatgcaaaaatgtatactttaattttaaaacccaatttttgttctcaacttgaaaagggaacacttttttgtttcacaaacaagctggtcggttggaattctttttggaacagtagtcccgcgctaaacactggttcttgcctccccacccccattctctaaaataaacccagcaaactgggaggtgcatttgtgccgctgcaggcttctactgctcactccatgcagcacacttagaccaaggagaaacggctgctttccagctcaaagtcgactcattagaagaaaaggtgggagactgggggtgacacatcgctgatttgtccggggttgttatctgctgctggcctttgcctcaaaggccaggggcagaggccttgccaggcactgtgttctggggccctggcctcatgctgtgctcagcgggttggccacgcggcccaggaagtgcagggcagtggcgctttgatcatacacagcaaacaggaatgggcggttcagggtcacctccaagacctcaggcttgttaagctgttgggtagactctgtgggctctctctcatccgcttcaagctcaaaaaaaatgctgttcagcacctcccccaccctgatgcggtcattgctcaatttttgcaggttcagctcggtgtgcagaatggcgggcagctcagcctgggcgagcaggtcctgcaggtcataagatccttgcagcaccagttggggcatggtcaggtggatggtccggggagatagtttcttcatccagttgagggagttttgctggaaagtgagaccctccaccttgtccaggtcagaggcatagtgaggctggatcagcagcaggcaggcgctctcagtgaagggcacttgagtcaccgagaagttgtcctggatgtcactccagtgctggaaggtgcccatgccagagagcatgggaacagacactgaggtgctgttgtccacccagaactcctggggctcggccagcagggagaagcccttcatcttcccttggaagtggacgtaggtgttgaaagccagggtgctgtccacactggctcccatcagggagcagccagtcttccatcctgtcacagcctgcatgaacctgtcaatcttctcagcagcaacatccagttctgtgaagtccagagagcgtgggaggaccacaggggtatagagagccaggccctgcacaaacggctgcttcaggtgcaggcctggggctgtgaacacgcccaccaccgtggacagcagcagctgggcctggctatcagccctgccctgggccactagcaggccctgtacagcctgcagggcagacaggaccttgtgcgcatccagccgggaggtgcagttcttgtccttccaaggaacacccaggattgcctgtagcctgtcagctgtgtggtccaaggctcccagatagagagaggccagggtgccaaagacagccgttggggagaggacggtggccccatggaccacgccccatagctcactgtgcatgccatatatacggaagcccaagaagttggccagcatcccgaccattgcggccctcaacttgtcttcggtgtcaagttttgcagcgactagcaccagctggtcctgtagggccttttcatccacaggggatgtcttggcctgaattggagcaggtatgaaggtggggtctttgggcttcccggcattggcctttgccagctgctcacaggtactctcattgtggatgacgaggtggaaggggtgtatgtacacccggtcacctgcagccaggccagcccaggccaggaggcagaggatggtggccctcaggctcacaccggcaggagccatctcagactggggtgctcgcttccgcatacccttctgctgtagtacccagaacaacggcagcttcttcccccggccgggtcacgatgccctatttatagctgaggggtggggatggagctgttcccaggctgcctgtgcacaggctggagaggagggttacatcacttggccagaccacaggctggccagaaggacagatgccagaagcgacactcacgctgggacctcttccaggaagtcttagtgatcgatgcagagtttcactgctgaacagagtgagccggtgcagggtcgagttacacatttaccgaagtttgcaggagtcggggccaaggttcccagaaacgggagcatctccctaggtgtgtgacagcctgaggccaaccacccaggccttctgacccagccccgggagatgtacccccaagaggccacagggacatgcaggccggaggtgcagagggcagagggcaggggagagtcttgcttaggcaacacgggggccacttctgaccctgctgcccgctcatgggat

SEQ ID NO: 3 - DNA, 1834 bp, Macaca fascicularis
  source 1..1834: mol_type = genomic DNA
aagaagctgccattgttctgggtactacagcagaagggtatgcagaagcgagcaccccagtccgagatggctcctgccagcgtgagcctgagggccaccatcctctgcctcctggcctgggctggcctggccacaggtgaccgggtgtacatacaccccttccacctcgtcatccacaatgagagtacctgtgagcagctggcaaaggccgatgctgggaagcccaaagatcccaccttcacacctgttccgatacaggccaagacgtctcctgtggatgaaaaggccctgcaggaccagctagtgctggttgccgcaaaactcgacaccgaggacaagttgagagccgcgatggtcgggatgctggccaacttcttgggcttccgtatatatggcatgcacagtgagctatggggcgtggtccatggggccaccatcctctccccaacggctgtctttggcaccctggcctctctctacctgggagcgttggaccacacagccgacaggctacaggcaatcctgggcgtcccttggaaggacaagaactgcacctcccggctggatgcgcacaaggtcctctctgccctgcaggctgtacagggcctgctggtggcccagggcagggctgacggccagtcccagctgctgttgtccacagtggtgggtctcttcacagccccagatctgcacctgaagcagccgtttgtgcagggcctggctctctatgcccctgtggtcctcccacgctctctggacttcacagacctggaagtcgctgctgagaagattgacaggttcatgcaggctgtgacaggatggaagattagcagccccctgacgggagccagtgcggacagcaccctggttttcaacacctacgtccatttccaagggaagatgagggacttcttcctgctggctgagccccaggagttctgggtggacaacagcacctcagtgtctgtccccatgctgtctggcgtgggcaccttccagcactggagcgacgcccaggacaacttctcagtgactcaagtgccctttactgagagcgcctgcttgctgctgattcagcctcactacgcctctgacctggacaaggtggagggtctcactttccagcaaaactccctcaactggatgaagaaactgtctccccgggccatccacctgaccatgccccgactggtgctgcgaggatcttatgacctgcaggacctgcttgcccaggctgagctgcccgccattctgggcaccgagctgaacctgcaaaaattgagcaatgacaacctcagggtggggaaggtgctgaacagcattctttttgaactcgaagcggatgagagagagcccacagagtctacccgacagctgaacaggcctgagttcttggaggtgaccctggaccgcccattcctgtttgctgtgtatgatcaaagtgccactgccctgcacttcctgggccgtgtggccaacccgctgagcccagcatgaggccagggccccagaacacagcgcctggcaaggcctctgcccctggcctttgaggcgaaggccagcagcagatatgtaactctggaaaaaccagcgatttgtcacccccagtctcccaccttttcttctaatgagtcaacttcgagctggaaagcagtcgtttctccttggtctaagtggtgctgcgtgagcagtaagaaacctgtggcagcacaaatgcgcctcccaggttgctgggtttattttagagaatgggggtggggaggcaagaaccagtgtttagcgcgggaccaccgttccaaaaagaattccaaccgaccagcttgtttgtgaaaca

SEQ ID NO: 4 - DNA, 1834 bp, Macaca fascicularis
  source 1..1834: mol_type = genomic DNA
tgtttcacaaacaagctggtcggttggaattctttttggaacggtggtcccgcgctaaacactggttcttgcctccccacccccattctctaaaataaacccagcaacctgggaggcgcatttgtgctgccacaggtttcttactgctcacgcagcaccacttagaccaaggagaaacgactgctttccagctcgaagttgactcattagaagaaaaggtgggagactgggggtgacaaatcgctggtttttccagagttacatatctgctgctggccttcgcctcaaaggccaggggcagaggccttgccaggcgctgtgttctggggccctggcctcatgctgggctcagcgggttggccacacggcccaggaagtgcagggcagtggcactttgatcatacacagcaaacaggaatgggcggtccagggtcacctccaagaactcaggcctgttcagctgtcgggtagactctgtgggctctctctcatccgcttcgagttcaaaaagaatgctgttcagcaccttccccaccctgaggttgtcattgctcaatttttgcaggttcagctcggtgcccagaatggcgggcagctcagcctgggcaagcaggtcctgcaggtcataagatcctcgcagcaccagtcggggcatggtcaggtggatggcccggggagacagtttcttcatccagttgagggagttttgctggaaagtgagaccctccaccttgtccaggtcagaggcgtagtgaggctgaatcagcagcaagcaggcgctctcagtaaagggcacttgagtcactgagaagttgtcctgggcgtcgctccagtgctggaaggtgcccacgccagacagcatggggacagacactgaggtgctgttgtccacccagaactcctggggctcagccagcaggaagaagtccctcatcttcccttggaaatggacgtaggtgttgaaaaccagggtgctgtccgcactggctcccgtcagggggctgctaatcttccatcctgtcacagcctgcatgaacctgtcaatcttctcagcagcgacttccaggtctgtgaagtccagagagcgtgggaggaccacaggggcatagagagccaggccctgcacaaacggctgcttcaggtgcagatctggggctgtgaagagacccaccactgtggacaacagcagctgggactggccgtcagccctgccctgggccaccagcaggccctgtacagcctgcagggcagagaggaccttgtgcgcatccagccgggaggtgcagttcttgtccttccaagggacgcccaggattgcctgtagcctgtcggctgtgtggtccaacgctcccaggtagagagaggccagggtgccaaagacagccgttggggagaggatggtggccccatggaccacgccccatagctcactgtgcatgccatatatacggaagcccaagaagttggccagcatcccgaccatcgcggctctcaacttgtcctcggtgtcgagttttgcggcaaccagcactagctggtcctgcagggccttttcatccacaggagacgtcttggcctgtatcggaacaggtgtgaaggtgggatctttgggcttcccagcatcggcctttgccagctgctcacaggtactctcattgtggatgacgaggtggaaggggtgtatgtacacccggtcacctgtggccaggccagcccaggccaggaggcagaggatggtggccctcaggctcacgctggcaggagccatctcggactggggtgctcgcttctgcatacccttctgctgtagtacccagaacaatggcagcttctt

SEQ ID NO: 5 - DNA, 1856 bp, Mus musculus
  source 1..1856: mol_type = genomic DNA
gatagctgtgcttgtctaggttggcgctgaaggatacacagaagcaaatgcacagatcggagatgactcccacgggggcaggcctgaaggccaccatcttctgcatcttgacctgggtcagcctgacggctggggaccgcgtatacatccaccccttccatctcctttaccacaacaagagcacctgcgcccagctggagaaccccagtgtggagacactcccagagtcaacgttcgagcctgtgcccattcaggccaagacctcccctgtgaatgagaagaccctgcatgatcagctcgtgctggccgccgagaagctagaggatgaggaccggaagcgggctgcccaggtcgcaatgatcgccaacttcgtgggcttccgcatgtacaagatgctgaatgaggcaggaagtggggccagtggggccatcctctcaccaccagctctctttggcaccctggtctctttctaccttggatccttagatcccacggccagccagctgcagacgctgctggatgtccctgtgaaggagggagactgcacctcccgactagatggacacaaggtcctcgctgccctgcgggccattcagggcttgctggtcacccagggtgggagcagcagccagacacccctgctacagtccattgtggtggggctcttcactgctccaggctttcgtctaaagcactcatttgttcagagcctggctctctttacccctgccctcttcccacgctctctggatttatccactgacccagttcttgccactgagaaaatcaacaggttcataaaggctgtgacagggtggaagatgaacttgccactggagggggtcagtacagacagcaccctacttttcaacacctacgttcacttccaaggaacgatgagaggtttctctcagctgcctggagtccatgaattctgggtggacaacagcatctcggtgtctgtgcccatgatctccggcactggcaacttccagcactggagtgacacccagaacaacttctccgtgacgtgcgtgcccctaggtgagagagccaccctgctgctcatccagccccactgcacctcagatctcgacagggtggaggccctcatcttccggaacgacctcctgacttggatagagaacccgcctcctcgggccatccgcctgactctgccccagctggaaatccgaggatcctacaatctgcaggacctgctggctgaggacaagctgcccacccttttgggtgcggaggcaaatctgaacaacattggtgacaccaacccccgagtgggagaggttctcaatagcatcctcctcgaactcaaagcaggagaggaggaacagccgaccacgtctgtccagcagcctggctcaccggaggcactggatgtgaccctgagcagccccttcctgttcgccatctacgagcaggactcaggcacgctgcactttctgggcagagtgaataacccccagagtgtggtgtgaggccttgtgcctagccatggagacaaggccggtgtcggagaaccgttctgggcaaaactcagtgctgtcacccctggctccccatcacgccttgtagcgcggcagaggccgtctccttggagactgcgctgaccgagaataaatgatgagcagcagagcctcctgggatgtgggtttgtttggatactggggtgacagccagaagctggcactctgcacaggactgccactctggaagaaatttggaccaaaaaactgtttgtgacaccaaaaagcacccccccttttttttatttgaggacagaaattgggttttaacattaaaatgcacattatccccttaaaaaaaaaaaaaaaaaa

SEQ ID NO: 6 - DNA, 1856 bp, Mus musculus
  source 1..1856: mol_type = genomic DNA
ttttttttttttttttttaaggggataatgtgcattttaatgttaaaacccaatttctgtcctcaaataaaaaaaagggggggtgctttttggtgtcacaaacagttttttggtccaaatttcttccagagtggcagtcctgtgcagagtgccagcttctggctgtcaccccagtatccaaacaaacccacatcccaggaggctctgctgctcatcatttattctcggtcagcgcagtctccaaggagacggcctctgccgcgctacaaggcgtgatggggagccaggggtgacagcactgagttttgcccagaacggttctccgacaccggccttgtctccatggctaggcacaaggcctcacaccacactctgggggttattcactctgcccagaaagtgcagcgtgcctgagtcctgctcgtagatggcgaacaggaaggggctgctcagggtcacatccagtgcctccggtgagccaggctgctggacagacgtggtcggctgttcctcctctcctgctttgagttcgaggaggatgctattgagaacctctcccactcgggggttggtgtcaccaatgttgttcagatttgcctccgcacccaaaagggtgggcagcttgtcctcagccagcaggtcctgcagattgtaggatcctcggatttccagctggggcagagtcaggcggatggcccgaggaggcgggttctctatccaagtcaggaggtcgttccggaagatgagggcctccaccctgtcgagatctgaggtgcagtggggctggatgagcagcagggtggctctctcacctaggggcacgcacgtcacggagaagttgttctgggtgtcactccagtgctggaagttgccagtgccggagatcatgggcacagacaccgagatgctgttgtccacccagaattcatggactccaggcagctgagagaaacctctcatcgttccttggaagtgaacgtaggtgttgaaaagtagggtgctgtctgtactgaccccctccagtggcaagttcatcttccaccctgtcacagcctttatgaacctgttgattttctcagtggcaagaactgggtcagtggataaatccagagagcgtgggaagagggcaggggtaaagagagccaggctctgaacaaatgagtgctttagacgaaagcctggagcagtgaagagccccaccacaatggactgtagcaggggtgtctggctgctgctcccaccctgggtgaccagcaagccctgaatggcccgcagggcagcgaggaccttgtgtccatctagtcgggaggtgcagtctccctccttcacagggacatccagcagcgtctgcagctggctggccgtgggatctaaggatccaaggtagaaagagaccagggtgccaaagagagctggtggtgagaggatggccccactggccccacttcctgcctcattcagcatcttgtacatgcggaagcccacgaagttggcgatcattgcgacctgggcagcccgcttccggtcctcatcctctagcttctcggcggccagcacgagctgatcatgcagggtcttctcattcacaggggaggtcttggcctgaatgggcacaggctcgaacgttgactctgggagtgtctccacactggggttctccagctgggcgcaggtgctcttgttgtggtaaaggagatggaaggggtggatgtatacgcggtccccagccgtcaggctgacccaggtcaagatgcagaagatggtggccttcaggcctgcccccgtgggagtcatctccgatctgtgcatttgcttctgtgtatccttcagcgccaacctagacaagcacagctatc

SEQ ID NO: 7 - DNA, 1958 bp, Rattus norvegicus
  source 1..1958: mol_type = genomic DNA
ccttgctccatcttggctaagcctggattcccatggtcccccgacctgggtcctcccccagcctctgtacagagtagcctgggaatagatccatcttcaccccctcgagtataaataaggctgcttggttcaccaggggatagctgtgcttgtctgggctggagctaaaggacacacagaagcaagtccacagatccgtgatgactcccacgggggcaggcctgaaggccaccatcttctgcatcctgacctgggtcagcctgacagctggggaccgcgtatacatccacccctttcatctcctctactacagcaagagcacctgcgcccagctggagaaccccagtgtggagacgctcccagagccaacctttgagcctgtgcccattcaggccaagacctcccccgtggatgagaagaccctgcgagataagctcgtgctggccactgagaagctagaggctgaggatcggcagcgagctgcccaggtcgcgatgattgccaacttcatgggtttccgcatgtacaagatgctgagtgaggcaagaggtgtagccagtggggccgtcctctctccaccggccctctttggcaccctggtctctttctaccttggatcgttggatcccacggccagccagttgcaggtgctgctgggcgtccctgtgaaggagggagactgcacctcccggctggacggacataaggtcctcactgccctgcaggctgttcagggcttgctggtcacccagggtggaagcagcagccagacacccctgctacagtccaccgtggtgggcctcttcactgccccaggcttgcgcctaaaacagccatttgttgagagcttgggtcccttcacccccgccatcttccctcgctctctggacttatccactgacccagttcttgctgcccagaaaatcaacaggtttgtgcaggctgtgacagggtggaagatgaacttgccactagagggggtcagcacggacagcaccctatttttcaacacctacgttcacttccaagggaagatgagaggcttctcccagctgactgggctccatgagttctgggtggacaacagcacctcagtgtctgtgcccatgctctcgggcactggcaacttccagcactggagtgacgcccagaacaacttctccgtgacacgcgtgcccctgggtgagagtgtcaccctgctgctgatccagccccagtgcgcctcagatctcgacagggtggaggtcctcgtcttccagcacgacttcctgacttggataaagaacccgcctcctcgggccatccgtctgaccctgccgcagctggaaattcggggatcctacaacctgcaggacctgctggctcaggccaagctgtctacccttttgggtgctgaggcaaatctgggcaagatgggtgacaccaacccccgagtgggagaggttctcaacagcatcctccttgaactccaagcaggcgaggaggagcagcccacagagtctgcccagcagcctggctcacccgaggtgctggacgtgaccctgagcagtccgttcctgttcgccatctacgagcgggactcaggtgcgctgcactttctgggcagagtggataacccccaaaatgtggtgtgatgcctcctgtgtagccatggagacaaggccagcgtcagagagctatcctgggcaaaaatcagtgccttcacccctggcttcccgtcactccttccagcaaggcagaggccgtctccttggagatggcgctaactgagaataaatgatgagcagcagcctcctggggtgtgggtttgtttggacactggggtgagagccaggagctggcactctgtataggaggactgccatcctggaaaaaaaaaatggaccaaacaactgtttgtgaaataaaaaaaaaaaaattccctttttatttgaaaaaaaaaaaaaaaaaaaaaaaaa

SEQ ID NO: 8 - DNA, 1958 bp, Rattus norvegicus
  source 1..1958: mol_type = genomic DNA
tttttttttttttttttttttttttcaaataaaaagggaatttttttttttttatttcacaaacagttgtttggtccattttttttttccaggatggcagtcctcctatacagagtgccagctcctggctctcaccccagtgtccaaacaaacccacaccccaggaggctgctgctcatcatttattctcagttagcgccatctccaaggagacggcctctgccttgctggaaggagtgacgggaagccaggggtgaaggcactgatttttgcccaggatagctctctgacgctggccttgtctccatggctacacaggaggcatcacaccacattttgggggttatccactctgcccagaaagtgcagcgcacctgagtcccgctcgtagatggcgaacaggaacggactgctcagggtcacgtccagcacctcgggtgagccaggctgctgggcagactctgtgggctgctcctcctcgcctgcttggagttcaaggaggatgctgttgagaacctctcccactcgggggttggtgtcacccatcttgcccagatttgcctcagcacccaaaagggtagacagcttggcctgagccagcaggtcctgcaggttgtaggatccccgaatttccagctgcggcagggtcagacggatggcccgaggaggcgggttctttatccaagtcaggaagtcgtgctggaagacgaggacctccaccctgtcgagatctgaggcgcactggggctggatcagcagcagggtgacactctcacccaggggcacgcgtgtcacggagaagttgttctgggcgtcactccagtgctggaagttgccagtgcccgagagcatgggcacagacactgaggtgctgttgtccacccagaactcatggagcccagtcagctgggagaagcctctcatcttcccttggaagtgaacgtaggtgttgaaaaatagggtgctgtccgtgctgaccccctctagtggcaagttcatcttccaccctgtcacagcctgcacaaacctgttgattttctgggcagcaagaactgggtcagtggataagtccagagagcgagggaagatggcgggggtgaagggacccaagctctcaacaaatggctgttttaggcgcaagcctggggcagtgaagaggcccaccacggtggactgtagcaggggtgtctggctgctgcttccaccctgggtgaccagcaagccctgaacagcctgcagggcagtgaggaccttatgtccgtccagccgggaggtgcagtctccctccttcacagggacgcccagcagcacctgcaactggctggccgtgggatccaacgatccaaggtagaaagagaccagggtgccaaagagggccggtggagagaggacggccccactggctacacctcttgcctcactcagcatcttgtacatgcggaaacccatgaagttggcaatcatcgcgacctgggcagctcgctgccgatcctcagcctctagcttctcagtggccagcacgagcttatctcgcagggtcttctcatccacgggggaggtcttggcctgaatgggcacaggctcaaaggttggctctgggagcgtctccacactggggttctccagctgggcgcaggtgctcttgctgtagtagaggagatgaaaggggtggatgtatacgcggtccccagctgtcaggctgacccaggtcaggatgcagaagatggtggccttcaggcctgcccccgtgggagtcatcacggatctgtggacttgcttctgtgtgtcctttagctccagcccagacaagcacagctatcccctggtgaaccaagcagccttatttatactcgagggggtgaagatggatctattcccaggctactctgtacagaggctgggggaggacccaggtcgggggaccatgggaatccaggcttagccaagatggagcaagg

SEQ ID NO: 9 - protein, 16 aa, unidentified
  source 1..16: note = Description of Unknown: RFGF sequence
AAVALLPAVLLALLAP

SEQ ID NO: 10 - protein, 11 aa, unidentified
  source 1..11: note = Description of Unknown: RFGF analogue sequence
AALLPVLLAAP

SEQ ID NO: 11 - protein, 13 aa, Human immunodeficiency virus 1
GRKKRRQRRRPPQ

SEQ ID NO: 12 - protein, 16 aa, Drosophila sp.
RQIKIWFQNRRMKWKK

SEQ ID NO: 13 - DNA, 21 bp, synthetic construct
  source 1..21: mol_type = other DNA; note = Description of Artificial Sequence: Synthetic oligonucleotide; note = Description of Combined DNA/RNA Molecule: Synthetic oligonucleotide
  modified_base 1: mod_base = OTHER; note = 2'-O-methylcytidine-3'-phosphate
  modified_base 2: mod_base = OTHER; note = 2'-O-methyluridine-3'-phosphate
  modified_base 3: mod_base = OTHER; note = 2'-O-methyluridine-3'-phosphate
  modified_base 5: mod_base = OTHER; note = 2'-O-methylcytidine-3'-phosphate
  modified_base 7: mod_base = OTHER; note = 2'-O-methylcytidine-3'-phosphate
  modified_base 8: mod_base = OTHER; note = 2'-O-methyluridine-3'-phosphate
  modified_base 12: mod_base = OTHER; note = 2'-O-methyluridine-3'-phosphate
  modified_base 14: mod_base = OTHER; note = 2'-O-methylcytidine-3'-phosphate
  modified_base 15: mod_base = OTHER; note = 2'-O-methyluridine-3'-phosphate
  modified_base 16: mod_base = OTHER; note = 2'-O-methyluridine-3'-phosphate
  modified_base 17: mod_base = OTHER; note = 2'-O-methylcytidine-3'-phosphate
  modified_base 20: mod_base = OTHER; note = deoxy-thymine phosphorothioate
  misc_feature 1..19: note = RNA
  misc_feature 20..21: note = DNA
cttacgctgagtacttcgatt

SEQ ID NO: 14 - DNA, 21 bp, synthetic construct
  source 1..21: mol_type = other DNA; note = Description of Artificial Sequence: Synthetic oligonucleotide; note = Description of Combined DNA/RNA Molecule: Synthetic oligonucleotide
  modified_base 7: mod_base = OTHER; note = 2'-O-methyluridine-3'-phosphate
  modified_base 11: mod_base = OTHER; note = 2'-O-methylcytidine-3'-phosphate
  modified_base 16: mod_base = OTHER; note = 2'-O-methyluridine-3'-phosphate
  modified_base 20: mod_base = OTHER; note = deoxy-thymine phosphorothioate
  misc_feature 1..19: note = RNA
  misc_feature 20..21: note = DNA
tcgaagtactcagcgtaagtt

SEQ ID NO: 15 - RNA, 19 nt, synthetic construct
  source 1..19: mol_type = other RNA; note = Description of Artificial Sequence: Synthetic oligonucleotide
ttctgggtactacagcaga

SEQ ID NO: 16 - RNA, 19 nt, synthetic construct
  source 1..19: mol_type = other RNA; note = Description of Artificial Sequence: Synthetic oligonucleotide
gtactacagcagaagggta

SEQ ID NO: 17 - RNA, 19 nt, synthetic construct
  source 1..19: mol_type = other RNA; note = Description of Artificial Sequence: Synthetic oligonucleotide
gtgaccgggtgtacataca

SEQ ID NO: 18 - RNA, 19 nt, synthetic construct
  source 1..19: mol_type = other RNA; note = Description of Artificial Sequence: Synthetic oligonucleotide
ctcgtcatccacaatgaga

SEQ ID NO: 19 - RNA, 19 nt, synthetic construct
  source 1..19: mol_type = other RNA; note = Description of Artificial Sequence: Synthetic oligonucleotide
ccacaatgagagtacctgt

SEQ ID NO: 20 - RNA, 19 nt, synthetic construct
  source 1..19: mol_type = other RNA; note = Description of Artificial Sequence: Synthetic oligonucleotide
cacaatgagagtacctgtg

SEQ ID NO: 21 - RNA, 19 nt, synthetic construct
  source 1..19: mol_type = other RNA; note = Description of Artificial Sequence: Synthetic oligonucleotide
ctgtgagcagctggcaaag

SEQ ID NO: 22 - RNA, 19 nt, synthetic construct
  source 1..19: mol_type = other RNA; note = Description of Artificial Sequence: Synthetic oligonucleotide
ctgtggatgaaaaggccct

SEQ ID NO: 23 - RNA, 19 nt, synthetic construct
  source 1..19: mol_type = other RNA; note = Description of Artificial Sequence: Synthetic oligonucleotide
tggtcgggatgctggccaa

SEQ ID NO: 24 - RNA, 19 nt, synthetic construct
  source 1..19: mol_type = other RNA; note = Description of Artificial Sequence: Synthetic oligonucleotide
tcgggatgctggccaactt

SEQ ID NO: 25 - RNA, 19 nt, synthetic construct
  source 1..19: mol_type = other RNA; note = Description of Artificial Sequence: Synthetic oligonucleotide
ggatgctggccaacttctt

SEQ ID NO: 26 - RNA, 19 nt, synthetic construct
  source 1..19: mol_type = other RNA; note = Description of Artificial Sequence: Synthetic oligonucleotide
tggccaacttcttgggctt

SEQ ID NO: 27 - RNA, 19 nt, synthetic construct
  source 1..19: mol_type = other RNA; note = Description of Artificial Sequence: Synthetic oligonucleotide
cttcttgggcttccgtata

SEQ ID NO: 28 - RNA, 19 nt, synthetic construct
  source 1..19: mol_type = other RNA; note = Description of Artificial Sequence: Synthetic oligonucleotide
cttgggcttccgtatatat

SEQ ID NO: 29 - RNA, 19 nt, synthetic construct
  source 1..19: mol_type = other RNA; note = Description of Artificial Sequence: Synthetic oligonucleotide
gcttccgtatatatggcat

SEQ ID NO: 30 - RNA, 19 nt, synthetic construct
  source 1..19: mol_type = other RNA; note = Description of Artificial Sequence: Synthetic oligonucleotide
gtatatatggcatgcacag

SEQ ID NO: 31 - RNA, 19 nt, synthetic construct
  source 1..19: mol_type = other RNA; note = Description of Artificial Sequence: Synthetic oligonucleotide
ggcatgcacagtgagctat

SEQ ID NO: 32 - RNA, 19 nt, synthetic construct
  source 1..19: mol_type = other RNA; note = Description of Artificial Sequence: Synthetic oligonucleotide
ctatggggcgtggtccatg

SEQ ID NO: 33 - RNA, 19 nt, synthetic construct
  source 1..19: mol_type = other RNA; note = Description of Artificial Sequence: Synthetic oligonucleotide
ctccccaacggctgtcttt

SEQ ID NO: 34 - RNA, 19 nt, synthetic construct
  source 1..19: mol_type = other RNA; note = Description of Artificial Sequence: Synthetic oligonucleotide
tccccaacggctgtctttg

SEQ ID NO: 35 - RNA, 19 nt, synthetic construct
  source 1..19: mol_type = other RNA; note = Description of Artificial Sequence: Synthetic oligonucleotide
cttggaaggacaagaactg

SEQ ID NO: 36 - RNA, 19 nt, synthetic construct
  source 1..19: mol_type = other RNA; note = Description of Artificial Sequence: Synthetic oligonucleotide
ccacgctctctggacttca

SEQ ID NO: 37 - RNA, 19 nt, synthetic construct
  source 1..19: mol_type = other RNA; note = Description of Artificial Sequence: Synthetic oligonucleotide
gctgctgagaagattgaca

SEQ ID NO: 38 - RNA, 19 nt, synthetic construct
  source 1..19: mol_type = other RNA; note = Description of Artificial Sequence: Synthetic oligonucleotide
ctgctgagaagattgacag

SEQ ID NO: 39 - RNA, 19 nt, synthetic construct
  source 1..19: mol_type = other RNA; note = Description of Artificial Sequence: Synthetic oligonucleotide
tgctgagaagattgacagg

SEQ ID NO: 40 - RNA, 19 nt, synthetic construct
  source 1..19: mol_type = other RNA; note = Description of Artificial Sequence: Synthetic oligonucleotide
gctgagaagattgacaggt

SEQ ID NO: 41 - RNA, 19 nt, synthetic construct
  source 1..19: mol_type = other RNA; note = Description of Artificial Sequence: Synthetic oligonucleotide
ctgagaagattgacaggtt

SEQ ID NO: 42 - RNA, 19 nt, synthetic construct
  source 1..19: mol_type = other RNA; note = Description of Artificial Sequence: Synthetic oligonucleotide
ttgacaggttcatgcaggc

SEQ ID NO: 43 - RNA, 19 nt, synthetic construct
  source 1..19: mol_type = other RNA; note = Description of Artificial Sequence: Synthetic oligonucleotide
gctgtgacaggatggaaga

SEQ ID NO: 44 - RNA, 19 nt, synthetic construct
  source 1..19: mol_type = other RNA; note = Description of Artificial Sequence: Synthetic oligonucleotide
gagttctgggtggacaaca

SEQ ID NO: 45 - RNA, 19 nt, synthetic construct
  source 1..19: mol_type = other RNA; note = Description of Artificial Sequence: Synthetic oligonucleotide
ctgggtggacaacagcacc

SEQ ID NO: 46 - RNA, 19 nt, synthetic construct
  source 1..19: mol_type = other RNA; note = Description of Artificial Sequence: Synthetic oligonucleotide
tggacaacagcacctcagt

SEQ ID NO: 47 - RNA, 19 nt, synthetic construct
  source 1..19: mol_type = other RNA; note = Description of Artificial Sequence: Synthetic oligonucleotide
caacagcacctcagtgtct

SEQ ID NO: 48 - RNA, 19 nt, synthetic construct
  source 1..19: mol_type = other RNA; note = Description of Artificial Sequence: Synthetic oligonucleotide
tggacaaggtggagggtct

SEQ ID NO: 49 - RNA, 19 nt, synthetic construct
  source 1..19: mol_type = other RNA; note = Description of Artificial Sequence: Synthetic oligonucleotide
caaggtggagggtctcact

SEQ ID NO: 50 - RNA, 19 nt, synthetic construct
  source 1..19: mol_type = other RNA; note = Description of Artificial Sequence: Synthetic oligonucleotide
aggtggagggtctcacttt

SEQ ID NO: 51 - RNA, 19 nt, synthetic construct
  source 1..19: mol_type = other RNA; note = Description of Artificial Sequence: Synthetic oligonucleotide
ctttccagcaaaactccct

SEQ ID NO: 52 - RNA, 19 nt, synthetic construct
  source 1..19: mol_type = other RNA; note = Description of Artificial Sequence: Synthetic oligonucleotide
ccagcaaaactccctcaac

SEQ ID NO: 53 - RNA, 19 nt, synthetic construct
  source 1..19: mol_type = other RNA; note = Description of Artificial Sequence: Synthetic oligonucleotide
cagcaaaactccctcaact

SEQ ID NO: 54 - RNA, 19 nt, synthetic construct
  source 1..19: mol_type = other RNA; note = Description of Artificial Sequence: Synthetic oligonucleotide
caaaactccctcaactgga

SEQ ID NO: 55 - RNA, 19 nt, synthetic construct
  source 1..19: mol_type = other RNA; note = Description of Artificial Sequence: Synthetic oligonucleotide
tccctcaactggatgaaga

SEQ ID NO: 56 - RNA, 19 nt, synthetic construct
  source 1..19: mol_type = other RNA; note = Description of Artificial Sequence: Synthetic oligonucleotide
ccctcaactggatgaagaa

SEQ ID NO: 57 - RNA, 19 nt, synthetic construct
  source 1..19: mol_type = other RNA; note = Description of Artificial Sequence: Synthetic oligonucleotide
tcaactggatgaagaaact

SEQ ID NO: 58 - RNA, 19 nt, synthetic construct
  source 1..19: mol_type = other RNA; note = Description of Artificial Sequence: Synthetic oligonucleotide
ccgagctgaacctgcaaaa

SEQ ID NO: 59 - RNA, 19 nt, synthetic construct
  source 1..19: mol_type = other RNA; note = Description of Artificial Sequence: Synthetic oligonucleotide
cgagctgaacctgcaaaaa

SEQ ID NO: 60 - RNA, 19 nt, synthetic construct
  source 1..19: mol_type = other RNA; note = Description of Artificial Sequence: Synthetic oligonucleotide
gaacctgcaaaaattgagc

SEQ ID NO: 61 - RNA, 19 nt, synthetic construct
  source 1..19: mol_type = other RNA; note = Description of Artificial Sequence: Synthetic oligonucleotide
acctgcaaaaattgagcaa

SEQ ID NO: 62 - RNA, 19 nt, synthetic construct
  source 1..19: mol_type = other RNA; note = Description of Artificial Sequence: Synthetic oligonucleotide
cctgcaaaaattgagcaat

SEQ ID NO: 63 - RNA, 19 nt, synthetic construct
  source 1..19: mol_type = other RNA; note = Description of Artificial Sequence: Synthetic oligonucleotide
ctgcaaaaattgagcaatg

SEQ ID NO: 64 - RNA, 19 nt, synthetic construct
  source 1..19: mol_type = other RNA; note = Description of Artificial Sequence: Synthetic oligonucleotide
tgcaaaaattgagcaatga

SEQ ID NO: 65 - RNA, 19 nt, synthetic construct
  source 1..19: mol_type = other RNA; note = Description of Artificial Sequence: Synthetic oligonucleotide
gcaaaaattgagcaatgac

SEQ ID NO: 66 - RNA, 19 nt, synthetic construct
  source 1..19: mol_type = other RNA; note = Description of Artificial Sequence: Synthetic oligonucleotide
gggtgggggaggtgctgaa

SEQ ID NO: 67 - RNA, 19 nt, synthetic construct
  source 1..19: mol_type = other RNA; note = Description of Artificial Sequence: Synthetic oligonucleotide
ggatgagagagagcccaca

SEQ ID NO: 68 - RNA, 19 nt, synthetic construct
  source 1..19: mol_type = other RNA; note = Description of Artificial Sequence: Synthetic oligonucleotide
ccgcccattcctgtttgct

SEQ ID NO: 69 - RNA, 19 nt, synthetic construct
  source 1..19: mol_type = other RNA; note = Description of Artificial Sequence: Synthetic oligonucleotide
attcctgtttgctgtgtat

SEQ ID NO: 70 - RNA, 19 nt, synthetic construct
  source 1..19: mol_type = other RNA; note = Description of Artificial Sequence: Synthetic oligonucleotide
tcctgtttgctgtgtatga

SEQ ID NO: 71 - RNA, 19 nt, synthetic construct
  source 1..19: mol_type = other RNA; note = Description of Artificial Sequence: Synthetic oligonucleotide
gtttgctgtgtatgatcaa

SEQ ID NO: 72 - RNA, 19 nt, synthetic construct
  source 1..19: mol_type = other RNA; note = Description of Artificial Sequence: Synthetic oligonucleotide
tttgctgtgtatgatcaaa

SEQ ID NO: 73 - RNA, 19 nt, synthetic construct
  source 1..19: mol_type = other RNA; note = Description of Artificial Sequence: Synthetic oligonucleotide
cccccagtctcccaccttt

SEQ ID NO: 74 - RNA, 19 nt, synthetic construct
  source 1..19: mol_type = other RNA; note = Description of Artificial Sequence: Synthetic oligonucleotide
cccaccttttcttctaatg

SEQ ID NO: 75 - RNA, 19 nt, synthetic construct
  source 1..19: mol_type = other RNA; note = Description of Artificial Sequence: Synthetic oligonucleotide
ccaccttttcttctaatga

SEQ ID NO: 76 - RNA, 19 nt, synthetic construct
  source 1..19: mol_type = other RNA; note = Description of Artificial Sequence: Synthetic oligonucleotide
caccttttcttctaatgag

SEQ ID NO: 77 - RNA, 19 nt, synthetic construct
  source 1..19: mol_type = other RNA; note = Description of Artificial Sequence: Synthetic oligonucleotide
gtttctccttggtctaagt

SEQ ID NO: 78 - RNA, 19 nt, synthetic construct
  source 1..19: mol_type = other RNA; note = Description of Artificial Sequence: Synthetic oligonucleotide
ttgctgggtttattttaga

SEQ ID NO: 79 - RNA, 19 nt, synthetic construct
  source 1..19: mol_type = other RNA; note = Description of Artificial Sequence: Synthetic oligonucleotide
tgctgggtttattttagag

SEQ ID NO: 80 - RNA, 19 nt, synthetic construct
  source 1..19: mol_type = other RNA; note = Description of Artificial Sequence: Synthetic oligonucleotide
gctgggtttattttagaga

SEQ ID NO: 81 - RNA, 19 nt, synthetic construct
  source 1..19: mol_type = other RNA; note = Description of Artificial Sequence: Synthetic oligonucleotide
ctgggtttattttagagaa

SEQ ID NO: 82 - RNA, 19 nt, synthetic construct
  source 1..19: mol_type = other RNA; note = Description of Artificial Sequence: Synthetic oligonucleotide
tgggtttattttagagaat

SEQ ID NO: 83 - RNA, 19 nt, synthetic construct
  source 1..19: mol_type = other RNA; note = Description of Artificial Sequence: Synthetic oligonucleotide
gtttattttagagaatggg

SEQ ID NO: 84 - RNA, 19 nt, synthetic construct
  source 1..19: mol_type = other RNA; note = Description of Artificial Sequence: Synthetic oligonucleotide
tattttagagaatgggggt

SEQ ID NO: 85 - RNA, 19 nt, synthetic construct
  source 1..19: mol_type = other RNA; note = Description of Artificial Sequence: Synthetic oligonucleotide
tggggaggcaagaaccagt

SEQ ID NO: 86 - RNA, 19 nt, synthetic construct
  source 1..19: mol_type = other RNA; note = Description of Artificial Sequence: Synthetic oligonucleotide
ggaggcaagaaccagtgtt

SEQ ID NO: 87 - RNA, 19 nt, synthetic construct
  source 1..19: mol_type = other RNA; note = Description of Artificial Sequence: Synthetic oligonucleotide
tccaaaaagaattccaacc

SEQ ID NO: 88 - RNA, 19 nt, synthetic construct
  source 1..19: mol_type = other RNA; note = Description of Artificial Sequence: Synthetic oligonucleotide
caaaaagaattccaaccga

SEQ ID NO: 89 - RNA, 19 nt, synthetic construct
  source 1..19: mol_type = other RNA; note = Description of Artificial Sequence: Synthetic oligonucleotide
ccaaccgaccagcttgttt

SEQ ID NO: 90 - RNA, 19 nt, synthetic construct
  source 1..19: mol_type = other RNA; note = Description of Artificial Sequence: Synthetic oligonucleotide
ccgaccagcttgtttgtga

SEQ ID NO: 91 - RNA, 19 nt, synthetic construct
  source 1..19: mol_type = other RNA; note = Description of Artificial Sequence: Synthetic oligonucleotide
cgaccagcttgtttgtgaa

SEQ ID NO: 92 - RNA, 19 nt, synthetic construct
  source 1..19: mol_type = other RNA; note = Description of Artificial Sequence: Synthetic oligonucleotide
gaccagcttgtttgtgaaa

SEQ ID NO: 93 - RNA, 19 nt, synthetic construct
  source 1..19: mol_type = other RNA; note = Description of Artificial Sequence: Synthetic oligonucleotide
gcttgtttgtgaaacaaaa

SEQ ID NO: 94 - RNA, 19 nt, synthetic construct
  source 1..19: mol_type = other RNA; note = Description of Artificial Sequence: Synthetic oligonucleotide
cttgtttgtgaaacaaaaa

SEQ ID NO: 95 - RNA, 19 nt, synthetic construct
  source 1..19: mol_type = other RNA; note = Description of Artificial Sequence: Synthetic oligonucleotide
ttgtttgtgaaacaaaaaa

SEQ ID NO: 96 - RNA, 19 nt, synthetic construct
  source 1..19: mol_type = other RNA; note = Description of Artificial Sequence: Synthetic oligonucleotide
gtttgtgaaacaaaaaagt

SEQ ID NO: 97 - RNA, 19 nt, synthetic construct
  source 1..19: mol_type = other RNA; note = Description of Artificial Sequence: Synthetic oligonucleotide
ttgtgaaacaaaaaagtgt

SEQ ID NO: 98 - RNA, 19 nt, synthetic construct
  source 1..19: mol_type = other RNA; note = Description of Artificial Sequence: Synthetic oligonucleotide
tgaaacaaaaaagtgttcc

SEQ ID NO: 99 - RNA, 19 nt, synthetic construct
  source 1..19: mol_type = other RNA; note = Description of Artificial Sequence: Synthetic oligonucleotide
caaaaaagtgttccctttt

SEQ ID NO: 100 - RNA, 19 nt, synthetic construct
  source 1..19: mol_type = other RNA; note = Description of Artificial Sequence: Synthetic oligonucleotide
aaaaagtgttcccttttca

SEQ ID NO: 101 - RNA, 19 nt, synthetic construct
  source 1..19: mol_type = other RNA; note = Description of Artificial Sequence: Synthetic oligonucleotide
aaaagtgttcccttttcaa

SEQ ID NO: 102 - RNA, 19 nt, synthetic construct
  source 1..19: mol_type = other RNA; note = Description of Artificial Sequence: Synthetic oligonucleotide
ttcccttttcaagttgaga

SEQ ID NO: 103 - RNA, 19 nt, synthetic construct
  source 1..19: mol_type = other RNA; note = Description of Artificial Sequence: Synthetic oligonucleotide
ccttttcaagttgagaaca

SEQ ID NO: 104 - RNA, 19 nt, synthetic construct
  source 1..19: mol_type = other RNA; note = Description of Artificial Sequence: Synthetic oligonucleotide
tttcaagttgagaacaaaa

SEQ ID NO: 105 - RNA, 19 nt, synthetic construct
  source 1..19: mol_type = other RNA; note = Description of Artificial Sequence: Synthetic oligonucleotide
ttcaagttgagaacaaaaa

SEQ ID NO: 106 - RNA, 19 nt, synthetic construct
  source 1..19: mol_type = other RNA; note = Description of Artificial Sequence: Synthetic oligonucleotide
caagttgagaacaaaaatt

SEQ ID NO: 107 - RNA, 19 nt, synthetic construct
  source 1..19: mol_type = other RNA; note = Description of Artificial Sequence: Synthetic oligonucleotide
agttgagaacaaaaattgg

SEQ ID NO: 108 - RNA, 19 nt, synthetic construct
  source 1..19: mol_type = other RNA; note = Description of Artificial Sequence: Synthetic oligonucleotide
gttgagaacaaaaattggg

SEQ ID NO: 109 - RNA, 19 nt, synthetic construct
  source 1..19: mol_type = other RNA; note = Description of Artificial Sequence: Synthetic oligonucleotide
tgagaacaaaaattgggtt

SEQ ID NO: 110 - RNA, 19 nt, synthetic construct
  source 1..19: mol_type = other RNA; note = Description of Artificial Sequence: Synthetic oligonucleotide
gagaacaaaaattgggttt

SEQ ID NO: 111 - RNA, 19 nt, synthetic construct
  source 1..19: mol_type = other RNA; note = Description of Artificial Sequence: Synthetic oligonucleotide
gaacaaaaattgggtttta

SEQ ID NO: 112 - RNA, 19 nt, synthetic construct
  source 1..19: mol_type = other RNA; note = Description of Artificial Sequence: Synthetic oligonucleotide
aacaaaaattgggttttaa

SEQ ID NO: 113 - RNA, 19 nt, synthetic construct
  source 1..19: mol_type = other RNA; note = Description of Artificial Sequence: Synthetic oligonucleotide
acaaaaattgggttttaaa

SEQ ID NO: 114 - RNA, 19 nt, synthetic construct
  source 1..19: mol_type = other RNA; note = Description of Artificial Sequence: Synthetic oligonucleotide
caaaaattgggttttaaaa

SEQ ID NO: 115 - RNA, 19 nt, synthetic construct
  source 1..19: mol_type = other RNA; note = Description of Artificial Sequence: Synthetic oligonucleotide
attgggttttaaaattaaa

SEQ ID NO: 116 - RNA, 19 nt, synthetic construct
  source 1..19: mol_type = other RNA; note = Description of Artificial Sequence: Synthetic oligonucleotide
ttgggttttaaaattaaag

SEQ ID NO: 117 - RNA, 19 nt, synthetic construct
  source 1..19: mol_type = other RNA; note = Description of Artificial Sequence: Synthetic oligonucleotide
tgggttttaaaattaaagt

SEQ ID NO: 118 - RNA, 19 nt, synthetic construct
  source 1..19: mol_type = other RNA; note = Description of Artificial Sequence: Synthetic oligonucleotide
tttaaaattaaagtataca

SEQ ID NO: 119 - RNA, 19 nt, synthetic construct
  source 1..19: mol_type = other RNA; note = Description of Artificial Sequence: Synthetic oligonucleotide
ttaaaattaaagtatacat

SEQ ID NO: 120 - RNA, 19 nt, synthetic construct
  source 1..19: mol_type = other RNA; note = Description of Artificial Sequence: Synthetic oligonucleotide
ttgtatttagtgtcttgaa

SEQ ID NO: 121 - RNA, 19 nt, synthetic construct
  source 1..19: mol_type = other RNA; note = Description of Artificial Sequence: Synthetic oligonucleotide
tgtatttagtgtcttgaat

SEQ ID NO: 122 - RNA, 19 nt, synthetic construct
  source 1..19: mol_type = other RNA; note = Description of Artificial Sequence: Synthetic oligonucleotide
tagtgtcttgaatgtaaga

SEQ ID NO: 123 - RNA, 19 nt, synthetic construct
  source 1..19: mol_type = other RNA; note = Description of Artificial Sequence: Synthetic oligonucleotide
cttgaatgtaagaacatga

SEQ ID NO: 124 - RNA, 19 nt, synthetic construct
  source 1..19: mol_type = other RNA; note = Description of Artificial Sequence: Synthetic oligonucleotide
ttgaatgtaagaacatgac

SEQ ID NO: 125 - RNA, 19 nt, synthetic construct
  source 1..19: mol_type = other RNA; note = Description of Artificial Sequence: Synthetic oligonucleotide
cttagttttttccacagat

SEQ ID NO: 126 - RNA, 19 nt, synthetic construct
  source 1..19: mol_type = other RNA; note = Description of Artificial Sequence: Synthetic oligonucleotide
ccacagatgcttgtgattt

SEQ ID NO: 127 - RNA, 19 nt, synthetic construct
  source 1..19: mol_type = other RNA; note = Description of Artificial Sequence: Synthetic oligonucleotide
acagatgcttgtgattttt

SEQ ID NO: 128 - RNA, 19 nt, synthetic construct
  source 1..19: mol_type = other RNA; note = Description of Artificial Sequence: Synthetic oligonucleotide
ctgaatttctgtttgaatg

SEQ ID NO: 129 - RNA, 19 nt, synthetic construct
  source 1..19: mol_type = other RNA; note = Description of Artificial Sequence: Synthetic oligonucleotide
aaccatagctggttatttc

SEQ ID NO: 130 - RNA, 19 nt, synthetic construct
  source 1..19: mol_type = other RNA; note = Description of Artificial Sequence: Synthetic oligonucleotide
ccatagctggttatttctc

SEQ ID NO: 131 - RNA, 19 nt, synthetic construct
  source 1..19: mol_type = other RNA; note = Description of Artificial Sequence: Synthetic oligonucleotide
tctgctgtagtacccagaa

SEQ ID NO: 132 - RNA, 19 nt, synthetic construct
  source 1..19: mol_type = other RNA; note = Description of Artificial Sequence: Synthetic oligonucleotide
tacccttctgctgtagtac

SEQ ID NO: 133 - RNA, 19 nt, synthetic construct
  source 1..19: mol_type = other RNA; note = Description of Artificial Sequence: Synthetic oligonucleotide
tgtatgtacacccggtcac

SEQ ID NO: 134 - RNA, 19 nt, synthetic construct
  source 1..19: mol_type = other RNA; note = Description of Artificial Sequence: Synthetic oligonucleotide
tctcattgtggatgacgag

SEQ ID NO: 135 - RNA, 19 nt, synthetic construct
  source 1..19: mol_type = other RNA; note = Description of Artificial Sequence: Synthetic oligonucleotide
acaggtactctcattgtgg

SEQ ID NO: 136 - RNA, 19 nt, synthetic construct
  source 1..19: mol_type = other RNA; note = Description of Artificial Sequence: Synthetic oligonucleotide
cacaggtactctcattgtg

SEQ ID NO: 137 - RNA, 19 nt, synthetic construct
  source 1..19: mol_type = other RNA; note = Description of Artificial Sequence: Synthetic oligonucleotide
ctttgccagctgctcacag

SEQ ID NO: 138 - RNA, 19 nt, synthetic construct
  source 1..19: mol_type = other RNA; note = Description of Artificial Sequence: Synthetic oligonucleotide
agggccttttcatccacag

SEQ ID NO: 139 - RNA, 19 nt, synthetic construct
  source 1..19: mol_type = other RNA; note = Description of Artificial Sequence: Synthetic oligonucleotide
ttggccagcatcccgacca

SEQ ID NO: 140 - RNA, 19 nt, synthetic construct
  source 1..19: mol_type = other RNA; note = Description of Artificial Sequence: Synthetic oligonucleotide
aagttggccagcatcccga

SEQ ID NO: 141 - RNA, 19 nt, synthetic construct
  source 1..19: mol_type = other RNA; note = Description of Artificial Sequence: Synthetic oligonucleotide
aagaagttggccagcatcc

SEQ ID NO: 142 - RNA, 19 nt, synthetic construct
  source 1..19: mol_type = other RNA; note = Description of Artificial Sequence: Synthetic oligonucleotide
aagcccaagaagttggcca

SEQ ID NO: 143 - RNA, 19 nt, synthetic construct
  source 1..19: mol_type = other RNA; note = Description of Artificial Sequence: Synthetic oligonucleotide
tatacggaagcccaagaag

SEQ ID NO: 144 - RNA, 19 nt, synthetic construct
  source 1..19: mol_type = other RNA; note = Description of Artificial Sequence: Synthetic oligonucleotide
atatatacggaagcccaag

SEQ ID NO: 145 - RNA, 19 nt, synthetic construct
  source 1..19: mol_type = other RNA; note = Description of Artificial Sequence: Synthetic oligonucleotide
atgccatatatacggaagc

SEQ ID NO: 146 - RNA, 19 nt, synthetic construct
  source 1..19: mol_type = other RNA; note = Description of Artificial Sequence: Synthetic oligonucleotide
ctgtgcatgccatatatac

SEQ ID NO: 147 - RNA, 19 nt, synthetic construct
  source 1..19: mol_type = other RNA; note = Description of Artificial Sequence: Synthetic oligonucleotide
atagctcactgtgcatgcc

SEQ ID NO: 148 - RNA, 19 nt, synthetic construct
  source 1..19: mol_type = other RNA; note = Description of Artificial Sequence: Synthetic oligonucleotide
catggaccacgccccatag

SEQ ID NO: 149 - RNA, 19 nt, synthetic construct
  source 1..19: mol_type = other RNA; note = Description of Artificial Sequence: Synthetic oligonucleotide
aaagacagccgttggggag

SEQ ID NO: 150 - RNA, 19 nt, synthetic construct
  source 1..19: mol_type = other RNA; note = Description of Artificial Sequence: Synthetic oligonucleotide
caaagacagccgttgggga

SEQ ID NO: 151 - RNA, 19 nt, synthetic construct
  source 1..19: mol_type = other RNA; note = Description of Artificial Sequence: Synthetic oligonucleotide
cagttcttgtccttccaag

SEQ ID NO: 152 - RNA, 19 nt, synthetic construct
  source 1..19: mol_type = other RNA; note = Description of Artificial Sequence: Synthetic oligonucleotide
tgaagtccagagagcgtgg

SEQ ID NO: 153 - RNA, 19 nt, synthetic construct
  source 1..19: mol_type = other RNA; note = Description of Artificial Sequence: Synthetic oligonucleotide
tgtcaatcttctcagcagc

SEQ ID NO: 154 - RNA, 19 nt, synthetic construct
  source 1..19: mol_type = other RNA; note = Description of Artificial Sequence: Synthetic oligonucleotide
ctgtcaatcttctcagcag

SEQ ID NO: 155 - RNA, 19 nt, synthetic construct
  source 1..19: mol_type = other RNA; note = Description of Artificial Sequence: Synthetic oligonucleotide
cctgtcaatcttctcagca

SEQ ID NO: 156 - RNA, 19 nt, synthetic construct
  source 1..19: mol_type = other RNA; note = Description of Artificial Sequence: Synthetic oligonucleotide
acctgtcaatcttctcagc

SEQ ID NO: 157 - RNA, 19 nt, synthetic construct
  source 1..19: mol_type = other RNA; note = Description of Artificial Sequence: Synthetic oligonucleotide
aacctgtcaatcttctcag

SEQ ID NO: 158 - RNA, 19 nt, synthetic construct
  source 1..19: mol_type = other RNA; note = Description of Artificial Sequence: Synthetic oligonucleotide
gcctgcatgaacctgtcaa

SEQ ID NO: 159 - RNA, 19 nt, synthetic construct
  source 1..19: mol_type = other RNA; note = Description of Artificial Sequence: Synthetic oligonucleotide
tcttccatcctgtcacagc

SEQ ID NO: 160 - RNA, 19 nt, synthetic construct
  source 1..19: mol_type = other RNA; note = Description of Artificial Sequence: Synthetic oligonucleotide
tgttgtccacccagaactc

SEQ ID NO: 161 - RNA, 19 nt, synthetic construct
  source 1..19: mol_type = other RNA; note = Description of Artificial Sequence: Synthetic oligonucleotide
ggtgctgttgtccacccag

SEQ ID NO: 162 - RNA, 19 nt, synthetic construct
  source 1..19: mol_type = other RNA; note = Description of Artificial Sequence: Synthetic oligonucleotide
actgaggtgctgttgtcca

SEQ ID NO: 163 - RNA, 19 nt, synthetic construct
  source 1..19: mol_type = other RNA; note = Description of Artificial Sequence: Synthetic oligonucleotide
agacactgaggtgctgttg

SEQ ID NO: 164 - RNA, 19 nt, synthetic construct
  source 1..19: mol_type = other RNA; note = Description of Artificial Sequence: Synthetic oligonucleotide
agaccctccaccttgtcca

SEQ ID NO: 165 - RNA, 19 nt, synthetic construct
  source 1..19: mol_type = other RNA; note = Description of Artificial Sequence: Synthetic oligonucleotide
agtgagaccctccaccttg

SEQ ID NO: 166 - RNA, 19 nt, synthetic construct
  source 1..19: mol_type = other RNA; note = Description of Artificial Sequence: Synthetic oligonucleotide
aaagtgagaccctccacct

SEQ ID NO: 167 - RNA, 19 nt, synthetic construct
  source 1..19: mol_type = other RNA; note = Description of Artificial Sequence: Synthetic oligonucleotide
agggagttttgctggaaag

SEQ ID NO: 168 - RNA, 19 nt, synthetic construct
  source 1..19: mol_type = other RNA; note = Description of Artificial Sequence: Synthetic oligonucleotide
gttgagggagttttgctgg

SEQ ID NO: 169 - RNA, 19 nt, synthetic construct
  source 1..19: mol_type = other RNA; note = Description of Artificial Sequence: Synthetic oligonucleotide
agttgagggagttttgctg

SEQ ID NO: 170 - RNA, 19 nt, synthetic construct
  source 1..19: mol_type = other RNA; note = Description of Artificial Sequence: Synthetic oligonucleotide
tccagttgagggagttttg

SEQ ID NO: 171 - RNA, 19 nt, synthetic construct
  source 1..19: mol_type = other RNA; note = Description of Artificial Sequence: Synthetic oligonucleotide
tcttcatccagttgaggga

SEQ ID NO: 172 - RNA, 19 nt, synthetic construct
  source 1..19: mol_type = other RNA; note = Description of Artificial Sequence: Synthetic oligonucleotide
ttcttcatccagttgaggg

SEQ ID NO: 173 - RNA, 19 nt, synthetic construct
  source 1..19: mol_type = other RNA; note = Description of Artificial Sequence: Synthetic oligonucleotide
agtttcttcatccagttga

SEQ ID NO: 174 - RNA, 19 nt, synthetic construct
  source 1..19: mol_type = other RNA; note = Description of Artificial Sequence: Synthetic oligonucleotide
ttttgcaggttcagctcgg

SEQ ID NO: 175 - RNA, 19 nt, synthetic construct
  source 1..19: mol_type = other RNA; note = Description of Artificial Sequence: Synthetic oligonucleotide
tttttgcaggttcagctcg

SEQ ID NO: 176 - RNA, 19 nt, synthetic construct
  source 1..19: mol_type = other RNA; note = Description of Artificial Sequence: Synthetic oligonucleotide
gctcaatttttgcaggttc

SEQ ID NO: 177 - RNA, 19 nt, synthetic construct
  source 1..19: mol_type = other RNA; note = Description of Artificial Sequence: Synthetic oligonucleotide
ttgctcaatttttgcaggt

SEQ ID NO: 178 - RNA, 19 nt, synthetic construct
  source 1..19: mol_type = other RNA; note = Description of Artificial Sequence: Synthetic oligonucleotide
attgctcaatttttgcagg

SEQ ID NO: 179 - RNA, 19 nt, synthetic construct
  source 1..19: mol_type = other RNA; note = Description of Artificial Sequence: Synthetic oligonucleotide
cattgctcaatttttgcag

SEQ ID NO: 180 - RNA, 19 nt, synthetic construct
  source 1..19: mol_type = other RNA; note = Description of Artificial Sequence: Synthetic oligonucleotide
tcattgctcaatttttgca

SEQ ID NO: 181 - RNA, 19 nt, synthetic construct
  source 1..19: mol_type = other RNA; note = Description of Artificial Sequence: Synthetic oligonucleotide
gtcattgctcaatttttgc

SEQ ID NO: 182 - RNA, 19 nt, synthetic construct
  source 1..19: mol_type = other RNA; note = Description of Artificial Sequence: Synthetic oligonucleotide
ttcagcacctcccccaccc

SEQ ID NO: 183 - RNA, 19 nt, synthetic construct
  source 1..19: mol_type = other RNA; note = Description of Artificial Sequence: Synthetic oligonucleotide
tgtgggctctctctcatcc

SEQ ID NO: 184 - RNA, 19 nt, synthetic construct
  source 1..19: mol_type = other RNA; note = Description of Artificial Sequence: Synthetic oligonucleotide
agcaaacaggaatgggcgg

SEQ ID NO: 185 - RNA, 19 nt, synthetic construct
  source 1..19: mol_type = other RNA; note = Description of Artificial Sequence: Synthetic oligonucleotide
atacacagcaaacaggaat

SEQ ID NO: 186 - RNA, 19 nt, synthetic construct
  source 1..19: mol_type = other RNA; note = Description of Artificial Sequence: Synthetic oligonucleotide
tcatacacagcaaacagga

SEQ ID NO: 187 - RNA, 19 nt, synthetic construct
  source 1..19: mol_type = other RNA; note = Description of Artificial Sequence: Synthetic oligonucleotide
ttgatcatacacagcaaac

SEQ ID NO: 188 - RNA, 19 nt, synthetic construct
  source 1..19: mol_type = other RNA; note = Description of Artificial Sequence: Synthetic oligonucleotide
tttgatcatacacagcaaa

SEQ ID NO: 189 - RNA, 19 nt, synthetic construct
  source 1..19: mol_type = other RNA; note = Description of Artificial Sequence: Synthetic oligonucleotide
aaaggtgggagactggggg

SEQ ID NO: 190 - RNA, 19 nt, synthetic construct
  source 1..19: mol_type = other RNA; note = Description of Artificial Sequence: Synthetic oligonucleotide
cattagaagaaaaggtggg

SEQ ID NO: 191 - RNA, 19 nt, synthetic construct
  source 1..19: mol_type = other RNA; note = Description of Artificial Sequence: Synthetic oligonucleotide
tcattagaagaaaaggtgg

SEQ ID NO: 192 - RNA, 19 nt, synthetic construct
  source 1..19: mol_type = other RNA; note = Description of Artificial Sequence: Synthetic oligonucleotide
ctcattagaagaaaaggtg

SEQ ID NO: 193 - RNA, 19 nt, synthetic construct
  source 1..19: mol_type = other RNA; note = Description of Artificial Sequence: Synthetic oligonucleotide
acttagaccaaggagaaac

SEQ ID NO: 194 - RNA, 19 nt, synthetic construct
  source 1..19: mol_type = other RNA; note = Description of Artificial Sequence: Synthetic oligonucleotide
tctaaaataaacccagcaa

SEQ ID NO: 195 - RNA, 19 nt, synthetic construct
  source 1..19: mol_type = other RNA; note = Description of Artificial Sequence: Synthetic oligonucleotide
ctctaaaataaacccagca

SEQ ID NO: 196 - RNA, 19 nt, synthetic construct
  source 1..19: mol_type = other RNA; note = Description of Artificial Sequence: Synthetic oligonucleotide
tctctaaaataaacccagc

SEQ ID NO: 197 - RNA, 19 nt, synthetic construct
  source 1..19: mol_type = other RNA; note = Description of Artificial Sequence: Synthetic oligonucleotide
ttctctaaaataaacccag

SEQ ID NO: 198 - RNA, 19 nt, synthetic construct
  source 1..19: mol_type = other RNA; note = Description of Artificial Sequence: Synthetic oligonucleotide
attctctaaaataaaccca

SEQ ID NO: 199 - RNA, 19 nt, synthetic construct
  source 1..19: mol_type = other RNA; note = Description of Artificial Sequence: Synthetic oligonucleotide
cccattctctaaaataaac

SEQ ID NO: 200 - RNA, 19 nt, synthetic construct
  source 1..19: mol_type = other RNA; note = Description of Artificial Sequence: Synthetic oligonucleotide
acccccattctctaaaata

SEQ ID NO: 201 - RNA, 19 nt, synthetic construct
  source 1..19: mol_type = other RNA; note = Description of Artificial Sequence: Synthetic oligonucleotide
actggttcttgcctcccca

SEQ ID NO: 202 - RNA, 19 nt, synthetic construct
  source 1..19: mol_type = other RNA; note = Description of Artificial Sequence: Synthetic oligonucleotide
aacactggttcttgcctcc

SEQ ID NO: 203 - RNA, 19 nt, synthetic construct
  source 1..19: mol_type = other RNA; note = Description of Artificial Sequence: Synthetic oligonucleotide
ggttggaattctttttgga

SEQ ID NO: 204 - RNA, 19 nt, synthetic construct
  source 1..19: mol_type = other RNA; note = Description of Artificial Sequence: Synthetic oligonucleotide
tcggttggaattctttttg

SEQ ID NO: 205 - RNA, 19 nt, synthetic construct
  source 1..19: mol_type = other RNA; note = Description of Artificial Sequence: Synthetic oligonucleotide
aaacaagctggtcggttgg

SEQ ID NO: 206 - RNA, 19 nt, synthetic construct
  source 1..19: mol_type = other RNA; note = Description of Artificial Sequence: Synthetic oligonucleotide
tcacaaacaagctggtcgg

SEQ ID NO: 207 - RNA, 19 nt, synthetic construct
  source 1..19: mol_type = other RNA; note = Description of Artificial Sequence: Synthetic oligonucleotide
ttcacaaacaagctggtcg

SEQ ID NO: 208 - RNA, 19 nt, synthetic construct
  source 1..19: mol_type = other RNA; note = Description of Artificial Sequence: Synthetic oligonucleotide
tttcacaaacaagctggtc

SEQ ID NO: 209 - RNA, 19 nt, synthetic construct
  source 1..19: mol_type = other RNA; note = Description of Artificial Sequence: Synthetic oligonucleotide
ttttgtttcacaaacaagc

SEQ ID NO: 210 - RNA, 19 nt, synthetic construct
  source 1..19: mol_type = other RNA; note = Description of Artificial Sequence: Synthetic oligonucleotide
tttttgtttcacaaacaag

SEQ ID NO: 211 - RNA, 19 nt, synthetic construct
  source 1..19: mol_type = other RNA; note = Description of Artificial Sequence: Synthetic oligonucleotide
ttttttgtttcacaaacaa

SEQ ID NO: 212 - RNA, 19 nt, synthetic construct
  source 1..19: mol_type = other RNA; note = Description of Artificial Sequence: Synthetic oligonucleotide
acttttttgtttcacaaac

SEQ ID NO: 213 - RNA, 19 nt, synthetic construct
  source 1..19: mol_type = other RNA; note = Description of Artificial Sequence: Synthetic oligonucleotide
acacttttttgtttcacaa

SEQ ID NO: 214 - RNA, 19 nt, synthetic construct
  source 1..19: mol_type = other RNA; note = Description of Artificial Sequence: Synthetic oligonucleotide
ggaacacttttttgtttca

SEQ ID NO: 215 - RNA, 19 nt, synthetic construct
  source 1..19: mol_type = other RNA; note = Description of Artificial Sequence: Synthetic oligonucleotide
aaaagggaacacttttttg

SEQ ID NO: 216 - RNA, 19 nt, synthetic construct
  source 1..19: mol_type = other RNA; note = Description of Artificial Sequence: Synthetic oligonucleotide
tgaaaagggaacacttttt

SEQ ID NO: 217 - RNA, 19 nt, synthetic construct
  source 1..19: mol_type = other RNA; note = Description of Artificial Sequence: Synthetic oligonucleotide
ttgaaaagggaacactttt

SEQ ID NO: 218 - RNA, 19 nt, synthetic construct
  source 1..19: mol_type = other RNA; note = Description of Artificial Sequence: Synthetic oligonucleotide
tctcaacttgaaaagggaa

SEQ ID NO: 219 - RNA, 19 nt, synthetic construct
  source 1..19: mol_type = other RNA; note = Description of Artificial Sequence: Synthetic oligonucleotide
tgttctcaacttgaaaagg

SEQ ID NO: 220 - RNA, 19 nt, synthetic construct
  source 1..19: mol_type = other RNA; note = Description of Artificial Sequence: Synthetic oligonucleotide
ttttgttctcaacttgaaa

SEQ ID NO: 221 - RNA, 19 nt, synthetic construct
  source 1..19: mol_type = other RNA; note = Description of Artificial Sequence: Synthetic oligonucleotide
tttttgttctcaacttgaa

SEQ ID NO: 222 - RNA, 19 nt, synthetic construct
  source 1..19: mol_type = other RNA; note = Description of Artificial Sequence: Synthetic oligonucleotide
aatttttgttctcaacttg

SEQ ID NO: 223 - RNA, 19 nt, synthetic construct
  source 1..19: mol_type = other RNA; note = Description of Artificial Sequence: Synthetic oligonucleotide
ccaatttttgttctcaact

SEQ ID NO: 224 - RNA, 19 nt, synthetic construct
  source 1..19: mol_type = other RNA; note = Description of Artificial Sequence: Synthetic oligonucleotide
cccaatttttgttctcaac

SEQ ID NO: 225 - RNA, 19 nt, synthetic construct
  source 1..19: mol_type = other RNA; note = Description of Artificial Sequence: Synthetic oligonucleotide
aacccaatttttgttctca

SEQ ID NO: 226 - RNA, 19 nt, synthetic construct
  source 1..19: mol_type = other RNA; note = Description of Artificial Sequence: Synthetic oligonucleotide
aaacccaatttttgttctc

SEQ ID NO: 227 - RNA, 19 nt, synthetic construct
  source 1..19: mol_type = other RNA; note = Description of Artificial Sequence: Synthetic oligonucleotide
taaaacccaatttttgttc

SEQ ID NO: 228 - RNA, 19 nt, synthetic construct
  source 1..19: mol_type = other RNA; note = Description of Artificial Sequence: Synthetic oligonucleotide
ttaaaacccaatttttgtt

SEQ ID NO: 229 - RNA, 19 nt, synthetic construct
  source 1..19: mol_type = other RNA; note = Description of Artificial Sequence: Synthetic oligonucleotide
tttaaaacccaatttttgt

SEQ ID NO: 230 - RNA, 19 nt, synthetic construct
  source 1..19: mol_type = other RNA; note = Description of Artificial Sequence: Synthetic oligonucleotide
ttttaaaacccaatttttg

SEQ ID NO: 231 - RNA, 19 nt, synthetic construct
  source 1..19: mol_type = other RNA; note = Description of Artificial Sequence: Synthetic oligonucleotide
tttaattttaaaacccaat

SEQ ID NO: 232 - RNA, 19 nt, synthetic construct
  source 1..19: mol_type = other RNA; note = Description of Artificial Sequence: Synthetic oligonucleotide
ctttaattttaaaacccaa

SEQ ID NO: 233 - RNA, 19 nt, synthetic construct
  source 1..19: mol_type = other RNA; note = Description of Artificial Sequence: Synthetic oligonucleotide
actttaattttaaaaccca

SEQ ID NO: 234 - RNA, 19 nt, synthetic construct
  source 1..19: mol_type = other RNA; note = Description of Artificial Sequence: Synthetic oligonucleotide
tgtatactttaattttaaa

SEQ ID NO: 235 - RNA, 19 nt, synthetic construct
  source 1..19: mol_type = other RNA; note = Description of Artificial Sequence: Synthetic oligonucleotide
atgtatactttaattttaa

SEQ ID NO: 236 - RNA, 19 nt, synthetic construct
  source 1..19: mol_type = other RNA; note = Description of Artificial Sequence: Synthetic oligonucleotide
ttcaagacactaaatacaa

SEQ ID NO: 237 - RNA, 19 nt, synthetic construct
  source 1..19: mol_type = other RNA; note = Description of Artificial Sequence: Synthetic oligonucleotide
attcaagacactaaataca

SEQ ID NO: 238 - RNA, 19 nt, synthetic construct
  source 1..19: mol_type = other RNA; note = Description of Artificial Sequence: Synthetic oligonucleotide
tcttacattcaagacacta

SEQ ID NO: 239 - RNA, 19 nt, synthetic construct
  source 1..19: mol_type = other RNA; note = Description of Artificial Sequence: Synthetic oligonucleotide
tcatgttcttacattcaag

SEQ ID NO: 240 - RNA, 19 nt, synthetic construct
  source 1..19: mol_type = other RNA; note = Description of Artificial Sequence: Synthetic oligonucleotide
gtcatgttcttacattcaa

SEQ ID NO: 241 - RNA, 19 nt, synthetic construct
  source 1..19: mol_type = other RNA; note = Description of Artificial Sequence: Synthetic oligonucleotide
atctgtggaaaaaactaag

SEQ ID NO: 242 - RNA, 19 nt, synthetic construct
  source 1..19: mol_type = other RNA; note = Description of Artificial Sequence: Synthetic oligonucleotide
aaatcacaagcatctgtgg

SEQ ID NO: 243 - RNA, 19 nt, synthetic construct
  source 1..19: mol_type = other RNA; note = Description of Artificial Sequence: Synthetic oligonucleotide
aaaaatcacaagcatctgt

SEQ ID NO: 244 - RNA, 19 nt, synthetic construct
  source 1..19: mol_type = other RNA; note = Description of Artificial Sequence: Synthetic oligonucleotide
cattcaaacagaaattcag

SEQ ID NO: 245 - RNA, 19 nt, synthetic construct
  source 1..19: mol_type = other RNA; note = Description of Artificial Sequence: Synthetic oligonucleotide
gaaataaccagctatggtt

SEQ ID NO: 246 - RNA, 19 nt, synthetic construct
  source 1..19: mol_type = other RNA; note = Description of Artificial Sequence: Synthetic oligonucleotide
gagaaataaccagctatgg

SEQ ID NO: 247 - DNA, 21 bp, synthetic construct
  source 1..21: mol_type = other DNA; note = Description of Artificial Sequence: Synthetic oligonucleotide; note = Description of Combined DNA/RNA Molecule: Synthetic oligonucleotide
  modified_base 1: mod_base = OTHER; note = 2'-O-methyluridine-3'-phosphate
  modified_base 2: mod_base = OTHER; note = 2'-O-methyluridine-3'-phosphate
  modified_base 3: mod_base = OTHER; note = 2'-O-methylcytidine-3'-phosphate
  modified_base 4: mod_base = OTHER; note = 2'-O-methyluridine-3'-phosphate
  modified_base 8: mod_base = OTHER; note = 2'-O-methyluridine-3'-phosphate
  modified_base 10: mod_base = OTHER; note = 2'-O-methylcytidine-3'-phosphate
  modified_base 11: mod_base = OTHER; note = 2'-O-methyluridine-3'-phosphate
  modified_base 13: mod_base = OTHER; note = 2'-O-methylcytidine-3'-phosphate
  modified_base 16: mod_base = OTHER; note = 2'-O-methylcytidine-3'-phosphate
  modified_base 20: mod_base = OTHER; note = deoxy-thymine phosphorothioate
  misc_feature 1..19: note = RNA
  misc_feature 20..21: note = DNA
ttctgggtactacagcagatt

SEQ ID NO: 248 - DNA, 21 bp, synthetic construct
  source 1..21: mol_type = other DNA; note = Description of Artificial Sequence: Synthetic oligonucleotide; note = Description of Combined DNA/RNA Molecule: Synthetic oligonucleotide
  modified_base 2: mod_base = OTHER; note = 2'-O-methyluridine-3'-phosphate
  modified_base 4: mod_base = OTHER; note = 2'-O-methylcytidine-3'-phosphate
  modified_base 5: mod_base = OTHER; note = 2'-O-methyluridine-3'-phosphate
  modified_base 7: mod_base = OTHER; note = 2'-O-methylcytidine-3'-phosphate
  modified_base 10: mod_base = OTHER; note = 2'-O-methylcytidine-3'-phosphate
  modified_base 18: mod_base = OTHER; note = 2'-O-methyluridine-3'-phosphate
  modified_base 20: mod_base = OTHER; note = deoxy-thymine phosphorothioate
  misc_feature 1..19: note = RNA
  misc_feature 20..21: note = DNA
gtactacagcagaagggtatt

SEQ ID NO: 249 - DNA, 21 bp, synthetic construct
  source 1..21: mol_type = other DNA; note = Description of Artificial Sequence: Synthetic oligonucleotide; note = Description of Combined DNA/RNA Molecule: Synthetic oligonucleotide
  modified_base 2: mod_base = OTHER; note = 2'-O-methyluridine-3'-phosphate
  modified_base 5: mod_base = OTHER; note = 2'-O-methylcytidine-3'-phosphate
  modified_base 6: mod_base = OTHER; note = 2'-O-methylcytidine-3'-phosphate
  modified_base 10: mod_base = OTHER; note = 2'-O-methyluridine-3'-phosphate
  modified_base 12: mod_base = OTHER; note = 2'-O-methyluridine-3'-phosphate
  modified_base 14: mod_base = OTHER; note = 2'-O-methylcytidine-3'-phosphate
  modified_base 16: mod_base = OTHER; note = 2'-O-methyluridine-3'-phosphate
  modified_base 18: mod_base = OTHER; note = 2'-O-methylcytidine-3'-phosphate
  modified_base 20: mod_base = OTHER; note = deoxy-thymine phosphorothioate
  misc_feature 1..19: note = RNA
  misc_feature 20..21: note = DNA
gtgaccgggtgtacatacatt

SEQ ID NO: 250 - DNA, 21 bp, synthetic construct
  source 1..21: mol_type = other DNA; note = Description of Artificial Sequence: Synthetic oligonucleotide; note = Description of Combined DNA/RNA Molecule: Synthetic oligonucleotide
  modified_base 1: mod_base = OTHER; note = 2'-O-methylcytidine-3'-phosphate
  modified_base 2: mod_base = OTHER; note = 2'-O-methyluridine-3'-phosphate
  modified_base 3: mod_base = OTHER; note = 2'-O-methylcytidine-3'-phosphate
  modified_base 5: mod_base = OTHER; note = 2'-O-methyluridine-3'-phosphate
  modified_base 6: mod_base = OTHER; note = 2'-O-methylcytidine-3'-phosphate
  modified_base 8: mod_base = OTHER; note = 2'-O-methyluridine-3'-phosphate
  modified_base 9: mod_base = OTHER; note = 2'-O-methylcytidine-3'-phosphate
  modified_base 10: mod_base = OTHER; note = 2'-O-methylcytidine-3'-phosphate
  modified_base 12: mod_base = OTHER; note = 2'-O-methylcytidine-3'-phosphate
  modified_base 15: mod_base = OTHER; note = 2'-O-methyluridine-3'-phosphate
  modified_base 20: mod_base = OTHER; note = deoxy-thymine phosphorothioate
  misc_feature 1..19: note = RNA
  misc_feature 20..21: note = DNA
ctcgtcatccacaatgagatt

SEQ ID NO: 251 - DNA, 21 bp, synthetic construct
  source 1..21: mol_type = other DNA; note = Description of Artificial Sequence: Synthetic oligonucleotide; note = Description of Combined DNA/RNA Molecule: Synthetic oligonucleotide
  modified_base 1: mod_base = OTHER; note = 2'-O-methylcytidine-3'-phosphate
  modified_base 2: mod_base = OTHER; note = 2'-O-methylcytidine-3'-phosphate
  modified_base 4: mod_base = OTHER; note = 2'-O-methylcytidine-3'-phosphate
  modified_base 7: mod_base = OTHER; note = 2'-O-methyluridine-3'-phosphate
  modified_base 13: mod_base = OTHER; note = 2'-O-methyluridine-3'-phosphate
  modified_base 15: mod_base = OTHER; note = 2'-O-methylcytidine-3'-phosphate
  modified_base 16: mod_base = OTHER; note = 2'-O-methylcytidine-3'-phosphate
  modified_base 17: mod_base = OTHER; note = 2'-O-methyluridine-3'-phosphate
  modified_base 19: mod_base = OTHER; note = 2'-O-methyluridine-3'-phosphate
  modified_base 20: mod_base = OTHER; note = deoxy-thymine phosphorothioate
  misc_feature 1..19: note = RNA
  misc_feature 20..21: note = DNA
ccacaatgagagtacctgttt

SEQ ID NO: 252 - DNA, 21 bp, synthetic construct
  source 1..21: mol_type = other DNA; note = Description of Artificial Sequence: Synthetic oligonucleotide; note = Description of Combined DNA/RNA Molecule: Synthetic oligonucleotide
  modified_base 1: mod_base = OTHER; note = 2'-O-methylcytidine-3'-phosphate
  modified_base 3: mod_base = OTHER; note = 2'-O-methylcytidine-3'-phosphate
  modified_base 6: mod_base = OTHER; note = 2'-O-methyluridine-3'-phosphate
  modified_base 12: mod_base = OTHER; note = 2'-O-methyluridine-3'-phosphate
  modified_base 14: mod_base = OTHER; note = 2'-O-methylcytidine-3'-phosphate
  modified_base 15: mod_base = OTHER; note = 2'-O-methylcytidine-3'-phosphate
  modified_base 16: mod_base = OTHER; note = 2'-O-methyluridine-3'-phosphate
  modified_base 18: mod_base = OTHER; note = 2'-O-methyluridine-3'-phosphate
  modified_base 20: mod_base = OTHER; note = deoxy-thymine phosphorothioate
  misc_feature 1..19: note = RNA
  misc_feature 20..21: note = DNA
cacaatgagagtacctgtgtt

SEQ ID NO: 253 - DNA, 21 bp, synthetic construct
  source 1..21: mol_type = other DNA; note = Description of Artificial Sequence: Synthetic oligonucleotide; note = Description of Combined DNA/RNA Molecule: Synthetic oligonucleotide
  modified_base 1: mod_base = OTHER; note = 2'-O-methylcytidine-3'-phosphate
  modified_base 2: mod_base = OTHER; note = 2'-O-methyluridine-3'-phosphate
  modified_base 4: mod_base = OTHER; note = 2'-O-methyluridine-3'-phosphate
  modified_base 8: mod_base = OTHER; note = 2'-O-methylcytidine-3'-phosphate
  modified_base 11: mod_base = OTHER; note = 2'-O-methylcytidine-3'-phosphate
  modified_base 12: mod_base = OTHER; note = 2'-O-methyluridine-3'-phosphate
  modified_base 15: mod_base = OTHER; note = 2'-O-methylcytidine-3'-phosphate
  modified_base 20: mod_base = OTHER; note = deoxy-thymine phosphorothioate
  misc_feature 1..19: note = RNA
  misc_feature 20..21: note = DNA
ctgtgagcagctggcaaagtt

SEQ ID NO: 254 - DNA, 21 bp, synthetic construct
  source 1..21: mol_type = other DNA; note = Description of Artificial Sequence: Synthetic oligonucleotide; note = Description of Combined DNA/RNA Molecule: Synthetic oligonucleotide
  modified_base 1: mod_base = OTHER; note = 2'-O-methylcytidine-3'-phosphate
  modified_base 2: mod_base = OTHER; note = 2'-O-methyluridine-3'-phosphate
  modified_base 4: mod_base = OTHER; note = 2'-O-methyluridine-3'-phosphate
  modified_base 8: mod_base = OTHER; note = 2'-O-methyluridine-3'-phosphate
  modified_base 16: mod_base = OTHER; note = 2'-O-methylcytidine-3'-phosphate
  modified_base 17: mod_base = OTHER; note = 2'-O-methylcytidine-3'-phosphate
  modified_base 18: mod_base = OTHER; note = 2'-O-methylcytidine-3'-phosphate
  modified_base 19: mod_base = OTHER; note = 2'-O-methyluridine-3'-phosphate
  modified_base 20: mod_base = OTHER; note = deoxy-thymine phosphorothioate
  misc_feature 1..19: note = RNA
  misc_feature 20..21: note = DNA
ctgtggatgaaaaggcccttt

SEQ ID NO: 255 - DNA, 21 bp, synthetic construct
  source 1..21: mol_type = other DNA; note = Description of Artificial Sequence: Synthetic oligonucleotide; note = Description of Combined DNA/RNA Molecule: Synthetic oligonucleotide
  modified_base 1: mod_base = OTHER; note = 2'-O-methyluridine-3'-phosphate
  modified_base 4: mod_base = OTHER; note = 2'-O-methyluridine-3'-phosphate
  modified_base 5: mod_base = OTHER; note = 2'-O-methylcytidine-3'-phosphate
  modified_base 10: mod_base = OTHER; note = 2'-O-methyluridine-3'-phosphate
  modified_base 12: mod_base = OTHER; note = 2'-O-methylcytidine-3'-phosphate
  modified_base 13: mod_base = OTHER; note = 2'-O-methyluridine-3'-phosphate
  modified_base 16: mod_base = OTHER; note = 2'-O-methylcytidine-3'-phosphate
  modified_base 17: mod_base = OTHER; note = 2'-O-methylcytidine-3'-phosphate
  modified_base 20: mod_base = OTHER; note = deoxy-thymine phosphorothioate
  misc_feature 1..19: note = RNA
  misc_feature 20..21: note = DNA
tggtcgggatgctggccaatt

SEQ ID NO: 256 - DNA, 21 bp, synthetic construct
  source 1..21: mol_type = other DNA; note = Description of Artificial Sequence: Synthetic oligonucleotide; note = Description of Combined DNA/RNA Molecule: Synthetic oligonucleotide
  modified_base 1: mod_base = OTHER; note = 2'-O-methyluridine-3'-phosphate
  modified_base 2: mod_base = OTHER; note = 2'-O-methylcytidine-3'-phosphate
  modified_base 7: mod_base = OTHER; note = 2'-O-methyluridine-3'-phosphate
  modified_base 9: mod_base = OTHER; note = 2'-O-methylcytidine-3'-phosphate
  modified_base 10: mod_base = OTHER; note = 2'-O-methyluridine-3'-phosphate
  modified_base 13: mod_base = OTHER; note = 2'-O-methylcytidine-3'-phosphate
  modified_base 14: mod_base = OTHER; note = 2'-O-methylcytidine-3'-phosphate
  modified_base 17: mod_base = OTHER; note = 2'-O-methylcytidine-3'-phosphate
  modified_base 18: mod_base = OTHER; note = 2'-O-methyluridine-3'-phosphate
  modified_base 19: mod_base = OTHER; note = 2'-O-methyluridine-3'-phosphate
  modified_base 20: mod_base = OTHER; note = deoxy-thymine phosphorothioate
  misc_feature 1..19: note = RNA
  misc_feature 20..21: note = DNA
tcgggatgctggccaactttt

SEQ ID NO: 257 - DNA, 21 bp, synthetic construct
  source 1..21: mol_type = other DNA; note = Description of Artificial Sequence: Synthetic oligonucleotide; note = Description of Combined DNA/RNA Molecule: Synthetic oligonucleotide
  modified_base 4: mod_base = OTHER; note = 2'-O-methyluridine-3'-phosphate
  modified_base 6: mod_base = OTHER; note = 2'-O-methylcytidine-3'-phosphate
  modified_base 7: mod_base = OTHER; note = 2'-O-methyluridine-3'-phosphate
  modified_base 10: mod_base = OTHER; note = 2'-O-methylcytidine-3'-phosphate
  modified_base 11: mod_base = OTHER; note = 2'-O-methylcytidine-3'-phosphate
  modified_base 14: mod_base = OTHER; note = 2'-O-methylcytidine-3'-phosphate
  modified_base 15: mod_base = OTHER; note = 2'-O-methyluridine-3'-phosphate
  modified_base 16: mod_base = OTHER; note = 2'-O-methyluridine-3'-phosphate
  modified_base 17: mod_base = OTHER; note = 2'-O-methylcytidine-3'-phosphate
  modified_base 18: mod_base = OTHER; note = 2'-O-methyluridine-3'-phosphate
  modified_base 19: mod_base = OTHER; note = 2'-O-methyluridine-3'-phosphate
  modified_base 20: mod_base = OTHER; note = deoxy-thymine phosphorothioate
  misc_feature 1..19: note = RNA
  misc_feature 20..21: note = DNA
ggatgctggccaacttctttt

SEQ ID NO: 258 - DNA, 21 bp, synthetic construct
  source 1..21: mol_type = other DNA; note = Description of Artificial Sequence: Synthetic oligonucleotide; note = Description of Combined DNA/RNA Molecule: Synthetic oligonucleotide
  modified_base 1: mod_base = OTHER; note = 2'-O-methyluridine-3'-phosphate
  modified_base 4: mod_base = OTHER; note = 2'-O-methylcytidine-3'-phosphate
  modified_base 5: mod_base = OTHER; note = 2'-O-methylcytidine-3'-phosphate
  modified_base 8: mod_base = OTHER; note = 2'-O-methylcytidine-3'-phosphate
  modified_base 9: mod_base = OTHER; note = 2'-O-methyluridine-3'-phosphate
  modified_base 10: mod_base = OTHER; note = 2'-O-methyluridine-3'-phosphate
  modified_base 11: mod_base = OTHER; note = 2'-O-methylcytidine-3'-phosphate
  modified_base 12: mod_base = OTHER; note = 2'-O-methyluridine-3'-phosphate
  modified_base 13: mod_base = OTHER; note = 2'-O-methyluridine-3'-phosphate
  modified_base 17: mod_base = OTHER; note = 2'-O-methylcytidine-3'-phosphate
  modified_base 18: mod_base = OTHER; note = 2'-O-methyluridine-3'-phosphate
  modified_base 19: mod_base = OTHER; note = 2'-O-methyluridine-3'-phosphate
  modified_base 20: mod_base = OTHER; note = deoxy-thymine phosphorothioate
  misc_feature 1..19: note = RNA
  misc_feature 20..21: note = DNA
tggccaacttcttgggctttt

SEQ ID NO: 259 - DNA, 21 bp, synthetic construct
  source 1..21: mol_type = other DNA; note = Description of Artificial Sequence: Synthetic oligonucleotide; note = Description of Combined DNA/RNA Molecule: Synthetic oligonucleotide
  modified_base 1: mod_base = OTHER; note = 2'-O-methylcytidine-3'-phosphate
  modified_base 2: mod_base = OTHER; note = 2'-O-methyluridine-3'-phosphate
  modified_base 3: mod_base = OTHER; note = 2'-O-methyluridine-3'-phosphate
  modified_base 4: mod_base = OTHER; note = 2'-O-methylcytidine-3'-phosphate
  modified_base 5: mod_base = OTHER; note = 2'-O-methyluridine-3'-phosphate
  modified_base 6: mod_base = OTHER; note = 2'-O-methyluridine-3'-phosphate
  modified_base 10: mod_base = OTHER; note = 2'-O-methylcytidine-3'-phosphate
  modified_base 11: mod_base = OTHER; note = 2'-O-methyluridine-3'-phosphate
  modified_base 12: mod_base = OTHER; note = 2'-O-methyluridine-3'-phosphate
  modified_base 13: mod_base = OTHER; note = 2'-O-methylcytidine-3'-phosphate
  modified_base 14: mod_base = OTHER; note = 2'-O-methylcytidine-3'-phosphate
  modified_base 16: mod_base = OTHER; note = 2'-O-methyluridine-3'-phosphate
  modified_base 18: mod_base = OTHER; note = 2'-O-methyluridine-3'-phosphate
  modified_base 20: mod_base = OTHER; note = deoxy-thymine phosphorothioate
  misc_feature 1..19: note = RNA
  misc_feature 20..21: note = DNA
cttcttgggcttccgtatatt

SEQ ID NO: 260 - DNA, 21 bp, synthetic construct
  source 1..21: mol_type = other DNA; note = Description of Artificial Sequence: Synthetic oligonucleotide; note = Description of Combined DNA/RNA Molecule: Synthetic oligonucleotide
  modified_base 1: mod_base = OTHER; note = 2'-O-methylcytidine-3'-phosphate
  modified_base 2: mod_base = OTHER; note = 2'-O-methyluridine-3'-phosphate
  modified_base 3: mod_base = OTHER; note = 2'-O-methyluridine-3'-phosphate
  modified_base 7: mod_base = OTHER; note = 2'-O-methylcytidine-3'-phosphate
  modified_base 8: mod_base = OTHER; note = 2'-O-methyluridine-3'-phosphate
  modified_base 9: mod_base = OTHER; note = 2'-O-methyluridine-3'-phosphate
  modified_base 10: mod_base = OTHER; note = 2'-O-methylcytidine-3'-phosphate
  modified_base 11: mod_base = OTHER; note = 2'-O-methylcytidine-3'-phosphate
  modified_base 13: mod_base = OTHER; note = 2'-O-methyluridine-3'-phosphate
  modified_base 15: mod_base = OTHER; note = 2'-O-methyluridine-3'-phosphate
  modified_base 17: mod_base = OTHER; note = 2'-O-methyluridine-3'-phosphate
  modified_base 19: mod_base = OTHER; note = 2'-O-methyluridine-3'-phosphate
  modified_base 20: mod_base = OTHER; note = deoxy-thymine phosphorothioate
  misc_feature 1..19: note = RNA
  misc_feature 20..21: note = DNA
cttgggcttccgtatatattt

SEQ ID NO: 261 - DNA, 21 bp, synthetic construct
  source 1..21: mol_type = other DNA; note = Description of Artificial Sequence: Synthetic oligonucleotide; note = Description of Combined DNA/RNA Molecule: Synthetic oligonucleotide
  modified_base 2: mod_base = OTHER; note = 2'-O-methylcytidine-3'-phosphate
  modified_base 3: mod_base = OTHER; note = 2'-O-methyluridine-3'-phosphate
  modified_base 4: mod_base = OTHER; note = 2'-O-methyluridine-3'-phosphate
  modified_base 5: mod_base = OTHER; note = 2'-O-methylcytidine-3'-phosphate
  modified_base 6: mod_base = OTHER; note = 2'-O-methylcytidine-3'-phosphate
  modified_base 8: mod_base = OTHER; note = 2'-O-methyluridine-3'-phosphate
  modified_base 10: mod_base = OTHER; note = 2'-O-methyluridine-3'-phosphate
  modified_base 12: mod_base = OTHER; note = 2'-O-methyluridine-3'-phosphate
  modified_base 14: mod_base = OTHER; note = 2'-O-methyluridine-3'-phosphate
  modified_base 17: mod_base = OTHER; note = 2'-O-methylcytidine-3'-phosphate
  modified_base 19: mod_base = OTHER; note = 2'-O-methyluridine-3'-phosphate
  modified_base 20: mod_base = OTHER; note = deoxy-thymine phosphorothioate
  misc_feature 1..19: note = RNA
  misc_feature 20..21: note = DNA
gcttccgtatatatggcattt

SEQ ID NO: 262 - DNA, 21 bp, synthetic construct
  source 1..21: mol_type = other DNA; note = Description of Artificial Sequence: Synthetic oligonucleotide; note = Description of Combined DNA/RNA Molecule: Synthetic oligonucleotide
  modified_base 2: mod_base = OTHER; note = 2'-O-methyluridine-3'-phosphate
  modified_base 4: mod_base = OTHER; note = 2'-O-methyluridine-3'-phosphate
  modified_base 6: mod_base = OTHER; note = 2'-O-methyluridine-3'-phosphate
  modified_base 8: mod_base = OTHER; note = 2'-O-methyluridine-3'-phosphate
  modified_base 11: mod_base = OTHER; note = 2'-O-methylcytidine-3'-phosphate
  modified_base 13: mod_base = OTHER; note = 2'-O-methyluridine-3'-phosphate
  modified_base 15: mod_base = OTHER; note = 2'-O-methylcytidine-3'-phosphate
  modified_base 17: mod_base = OTHER; note = 2'-O-methylcytidine-3'-phosphate
  modified_base 20: mod_base = OTHER; note = deoxy-thymine phosphorothioate
  misc_feature 1..19: note = RNA
  misc_feature 20..21: note = DNA
gtatatatggcatgcacagtt

SEQ ID NO: 263 - DNA, 21 bp, synthetic construct
  source 1..21: mol_type = other DNA; note = Description of Artificial Sequence: Synthetic oligonucleotide; note = Description of Combined DNA/RNA Molecule: Synthetic oligonucleotide
  modified_base 3: mod_base = OTHER; note = 2'-O-methylcytidine-3'-phosphate
  modified_base 5: mod_base = OTHER; note = 2'-O-methyluridine-3'-phosphate
  modified_base 7: mod_base = OTHER; note = 2'-O-methylcytidine-3'-phosphate
  modified_base 9: mod_base = OTHER; note = 2'-O-methylcytidine-3'-phosphate
  modified_base 12: mod_base = OTHER; note = 2'-O-methyluridine-3'-phosphate
  modified_base 16: mod_base = OTHER; note = 2'-O-methylcytidine-3'-phosphate
  modified_base 17: mod_base = OTHER; note = 2'-O-methyluridine-3'-phosphate
  modified_base 19: mod_base = OTHER; note = 2'-O-methyluridine-3'-phosphate
  modified_base 20: mod_base = OTHER; note = deoxy-thymine phosphorothioate
  misc_feature 1..19: note = RNA
  misc_feature 20..21: note = DNA
ggcatgcacagtgagctattt

SEQ ID NO: 264 - DNA, 21 bp, synthetic construct
  source 1..21: mol_type = other DNA; note = Description of Artificial Sequence: Synthetic oligonucleotide; note = Description of Combined DNA/RNA Molecule: Synthetic oligonucleotide
  modified_base 1: mod_base = OTHER; note = 2'-O-methylcytidine-3'-phosphate
  modified_base 2: mod_base = OTHER; note = 2'-O-methyluridine-3'-phosphate
  modified_base 4: mod_base = OTHER; note = 2'-O-methyluridine-3'-phosphate
  modified_base 9: mod_base = OTHER; note = 2'-O-methylcytidine-3'-phosphate
  modified_base 11: mod_base = OTHER; note = 2'-O-methyluridine-3'-phosphate
  modified_base 14: mod_base = OTHER; note = 2'-O-methyluridine-3'-phosphate
  modified_base 15: mod_base = OTHER; note = 2'-O-methylcytidine-3'-phosphate
  modified_base 16: mod_base = OTHER; note = 2'-O-methylcytidine-3'-phosphate
  modified_base 18: mod_base = OTHER; note = 2'-O-methyluridine-3'-phosphate
  modified_base 20: mod_base = OTHER; note = deoxy-thymine phosphorothioate
  misc_feature 1..19: note = RNA
  misc_feature 20..21: note = DNA
ctatggggcgtggtccatgtt

SEQ ID NO: 265 - DNA, 21 bp, synthetic construct
  source 1..21: mol_type = other DNA; note = Description of Artificial Sequence: Synthetic oligonucleotide; note = Description of Combined DNA/RNA Molecule: Synthetic oligonucleotide
  modified_base 1: mod_base = OTHER; note = 2'-O-methylcytidine-3'-phosphate
  modified_base 2: mod_base = OTHER; note = 2'-O-methyluridine-3'-phosphate
  modified_base 3: mod_base = OTHER; note = 2'-O-methylcytidine-3'-phosphate
  modified_base 4: mod_base = OTHER; note = 2'-O-methylcytidine-3'-phosphate
  modified_base 5: mod_base = OTHER; note = 2'-O-methylcytidine-3'-phosphate
  modified_base 6: mod_base = OTHER; note = 2'-O-methylcytidine-3'-phosphate
  modified_base 9: mod_base = OTHER; note = 2'-O-methylcytidine-3'-phosphate
  modified_base 12: mod_base = OTHER; note = 2'-O-methylcytidine-3'-phosphate
  modified_base 13: mod_base = OTHER; note = 2'-O-methyluridine-3'-phosphate
  modified_base 15: mod_base = OTHER; note = 2'-O-methyluridine-3'-phosphate
  modified_base 16: mod_base = OTHER; note = 2'-O-methylcytidine-3'-phosphate
  modified_base 17: mod_base = OTHER; note = 2'-O-methyluridine-3'-phosphate
  modified_base 18: mod_base = OTHER; note = 2'-O-methyluridine-3'-phosphate
  modified_base 19: mod_base = OTHER; note = 2'-O-methyluridine-3'-phosphate
  modified_base 20: mod_base = OTHER; note = deoxy-thymine phosphorothioate
  misc_feature 1..19: note = RNA
  misc_feature 20..21: note = DNA
ctccccaacggctgtcttttt

SEQ ID NO: 266 - DNA, 21 bp, synthetic construct
  source 1..21: mol_type = other DNA; note = Description of Artificial Sequence: Synthetic oligonucleotide; note = Description of Combined DNA/RNA Molecule: Synthetic oligonucleotide
  modified_base 1: mod_base = OTHER; note = 2'-O-methyluridine-3'-phosphate
  modified_base 2: mod_base = OTHER; note = 2'-O-methylcytidine-3'-phosphate
  modified_base 3: mod_base = OTHER; note = 2'-O-methylcytidine-3'-phosphate
  modified_base 4: mod_base = OTHER; note = 2'-O-methylcytidine-3'-phosphate
  modified_base 5: mod_base = OTHER; note = 2'-O-methylcytidine-3'-phosphate
  modified_base 8: mod_base = OTHER; note = 2'-O-methylcytidine-3'-phosphate
  modified_base 11: mod_base = OTHER; note = 2'-O-methylcytidine-3'-phosphate
  modified_base 12: mod_base = OTHER; note = 2'-O-methyluridine-3'-phosphate
  modified_base 14: mod_base = OTHER; note = 2'-O-methyluridine-3'-phosphate
  modified_base 15: mod_base = OTHER; note = 2'-O-methylcytidine-3'-phosphate
  modified_base 16: mod_base = OTHER; note = 2'-O-methyluridine-3'-phosphate
  modified_base 17: mod_base = OTHER; note = 2'-O-methyluridine-3'-phosphate
  modified_base 18: mod_base = OTHER; note = 2'-O-methyluridine-3'-phosphate
  modified_base 20: mod_base = OTHER; note = deoxy-thymine phosphorothioate
  misc_feature 1..19: note = RNA
  misc_feature 20..21: note = DNA
tccccaacggctgtctttgtt

SEQ ID NO: 267 - DNA, 21 bp, synthetic construct
  source 1..21: mol_type = other DNA; note = Description of Artificial Sequence: Synthetic oligonucleotide; note = Description of Combined DNA/RNA Molecule: Synthetic oligonucleotide
  modified_base 1: mod_base = OTHER; note = 2'-O-methylcytidine-3'-phosphate
  modified_base 2: mod_base = OTHER; note = 2'-O-methyluridine-3'-phosphate
  modified_base 3: mod_base = OTHER; note = 2'-O-methyluridine-3'-phosphate
  modified_base 11: mod_base = OTHER; note = 2'-O-methylcytidine-3'-phosphate
  modified_base 17: mod_base = OTHER; note = 2'-O-methylcytidine-3'-phosphate
  modified_base 18: mod_base = OTHER; note = 2'-O-methyluridine-3'-phosphate
  modified_base 20: mod_base = OTHER; note = deoxy-thymine phosphorothioate
  misc_feature 1..19: note = RNA
  misc_feature 20..21: note = DNA
cttggaaggacaagaactgtt

SEQ ID NO: 268 - DNA, 21 bp, synthetic construct
  source 1..21: mol_type = other DNA; note = Description of Artificial Sequence: Synthetic oligonucleotide; note = Description of Combined DNA/RNA Molecule: Synthetic oligonucleotide
  modified_base 1: mod_base = OTHER; note = 2'-O-methylcytidine-3'-phosphate
  modified_base 2: mod_base = OTHER; note = 2'-O-methylcytidine-3'-phosphate
  modified_base 4: mod_base = OTHER; note = 2'-O-methylcytidine-3'-phosphate
  modified_base 6: mod_base = OTHER; note = 2'-O-methylcytidine-3'-phosphate
  modified_base 7: mod_base = OTHER; note = 2'-O-methyluridine-3'-phosphate
  modified_base 8: mod_base = OTHER; note = 2'-O-methylcytidine-3'-phosphate
  modified_base 9: mod_base = OTHER; note = 2'-O-methyluridine-3'-phosphate
  modified_base 10: mod_base = OTHER; note = 2'-O-methylcytidine-3'-phosphate
  modified_base 11: mod_base = OTHER; note = 2'-O-methyluridine-3'-phosphate
  modified_base 15: mod_base = OTHER; note = 2'-O-methylcytidine-3'-phosphate
  modified_base 16: mod_base = OTHER; note = 2'-O-methyluridine-3'-phosphate
  modified_base 17: mod_base = OTHER; note = 2'-O-methyluridine-3'-phosphate
  modified_base 18: mod_base = OTHER; note = 2'-O-methylcytidine-3'-phosphate
  modified_base 20: mod_base = OTHER; note = deoxy-thymine phosphorothioate
  misc_feature 1..19: note = RNA
  misc_feature 20..21: note = DNA
ccacgctctctggacttcatt

SEQ ID NO: 269 - DNA, 21 bp, synthetic construct
  source 1..21: mol_type = other DNA; note = Description of Artificial Sequence: Synthetic oligonucleotide; note = Description of Combined DNA/RNA Molecule: Synthetic oligonucleotide
  modified_base 2: mod_base = OTHER; note = 2'-O-methylcytidine-3'-phosphate
  modified_base 3: mod_base = OTHER; note = 2'-O-methyluridine-3'-phosphate
  modified_base 5: mod_base = OTHER; note = 2'-O-methylcytidine-3'-phosphate
  modified_base 6: mod_base = OTHER; note = 2'-O-methyluridine-3'-phosphate
  modified_base 14: mod_base = OTHER; note = 2'-O-methyluridine-3'-phosphate
  modified_base 15: mod_base = OTHER; note = 2'-O-methyluridine-3'-phosphate
  modified_base 18: mod_base = OTHER; note = 2'-O-methylcytidine-3'-phosphate
  modified_base 20: mod_base = OTHER; note = deoxy-thymine phosphorothioate
  misc_feature 1..19: note = RNA
  misc_feature 20..21: note = DNA
gctgctgagaagattgacatt

SEQ ID NO: 270 - DNA, 21 bp, synthetic construct
  source 1..21: mol_type = other DNA; note = Description of Artificial Sequence: Synthetic oligonucleotide; note = Description of Combined DNA/RNA Molecule: Synthetic oligonucleotide
  modified_base 1: mod_base = OTHER; note = 2'-O-methylcytidine-3'-phosphate
  modified_base 2: mod_base = OTHER; note = 2'-O-methyluridine-3'-phosphate
  modified_base 4: mod_base = OTHER; note = 2'-O-methylcytidine-3'-phosphate
  modified_base 5: mod_base = OTHER; note = 2'-O-methyluridine-3'-phosphate
  modified_base 13: mod_base = OTHER; note = 2'-O-methyluridine-3'-phosphate
  modified_base 14: mod_base = OTHER; note = 2'-O-methyluridine-3'-phosphate
  modified_base 17: mod_base = OTHER; note = 2'-O-methylcytidine-3'-phosphate
  modified_base 20: mod_base = OTHER; note = deoxy-thymine phosphorothioate
  misc_feature 1..19: note = RNA
  misc_feature 20..21: note = DNA
ctgctgagaagattgacagtt

SEQ ID NO: 271 - DNA, 21 bp, synthetic construct
  source 1..21: mol_type = other DNA; note = Description of Artificial Sequence: Synthetic oligonucleotide; note = Description of Combined DNA/RNA Molecule: Synthetic oligonucleotide
  modified_base 1: mod_base = OTHER; note = 2'-O-methyluridine-3'-phosphate
  modified_base 3: mod_base = OTHER; note = 2'-O-methylcytidine-3'-phosphate
  modified_base 4: mod_base = OTHER; note = 2'-O-methyluridine-3'-phosphate
  modified_base 12: mod_base = OTHER; note = 2'-O-methyluridine-3'-phosphate
  modified_base 13: mod_base = OTHER; note = 2'-O-methyluridine-3'-phosphate
  modified_base 16: mod_base = OTHER; note = 2'-O-methylcytidine-3'-phosphate
  modified_base 20: mod_base = OTHER; note = deoxy-thymine phosphorothioate
  misc_feature 1..19: note = RNA
  misc_feature 20..21: note = DNA
tgctgagaagattgacaggtt

SEQ ID NO: 272 - DNA, 21 bp, synthetic construct
  source 1..21: mol_type = other DNA; note = Description of Artificial Sequence: Synthetic oligonucleotide; note = Description of Combined DNA/RNA Molecule: Synthetic oligonucleotide
  modified_base 2: mod_base = OTHER; note = 2'-O-methylcytidine-3'-phosphate
  modified_base 3: mod_base = OTHER; note = 2'-O-methyluridine-3'-phosphate
  modified_base 11: mod_base = OTHER; note = 2'-O-methyluridine-3'-phosphate
  modified_base 12: mod_base = OTHER; note = 2'-O-methyluridine-3'-phosphate
  modified_base 15: mod_base = OTHER; note = 2'-O-methylcytidine-3'-phosphate
  modified_base 19: mod_base = OTHER; note = 2'-O-methyluridine-3'-phosphate
  modified_base 20: mod_base = OTHER; note = deoxy-thymine phosphorothioate
  misc_feature 1..19: note = RNA
  misc_feature 20..21: note = DNA
gctgagaagattgacaggttt

SEQ ID NO: 273 - DNA, 21 bp, synthetic construct
  source 1..21: mol_type = other DNA; note = Description of Artificial Sequence: Synthetic oligonucleotide; note = Description of Combined DNA/RNA Molecule: Synthetic oligonucleotide
  modified_base 1: mod_base = OTHER; note = 2'-O-methylcytidine-3'-phosphate
  modified_base 2: mod_base = OTHER; note = 2'-O-methyluridine-3'-phosphate
  modified_base 10: mod_base = OTHER; note = 2'-O-methyluridine-3'-phosphate
  modified_base 11: mod_base = OTHER; note = 2'-O-methyluridine-3'-phosphate
  modified_base 14: mod_base = OTHER; note = 2'-O-methylcytidine-3'-phosphate
  modified_base 18: mod_base = OTHER; note = 2'-O-methyluridine-3'-phosphate
  modified_base 19: mod_base = OTHER; note = 2'-O-methyluridine-3'-phosphate
  modified_base 20: mod_base = OTHER; note = deoxy-thymine phosphorothioate
  misc_feature 1..19: note = RNA
  misc_feature 20..21: note = DNA
ctgagaagattgacaggtttt

SEQ ID NO: 274 - DNA, 21 bp, synthetic construct
  source 1..21: mol_type = other DNA; note = Description of Artificial Sequence: Synthetic oligonucleotide; note = Description of Combined DNA/RNA Molecule: Synthetic oligonucleotide
  modified_base 1: mod_base = OTHER; note = 2'-O-methyluridine-3'-phosphate
  modified_base 2: mod_base = OTHER; note = 2'-O-methyluridine-3'-phosphate
  modified_base 5: mod_base = OTHER; note = 2'-O-methylcytidine-3'-phosphate
  modified_base 9: mod_base = OTHER; note = 2'-O-methyluridine-3'-phosphate
  modified_base 10: mod_base = OTHER; note = 2'-O-methyluridine-3'-phosphate
  modified_base 11: mod_base = OTHER; note = 2'-O-methylcytidine-3'-phosphate
  modified_base 13: mod_base = OTHER; note = 2'-O-methyluridine-3'-phosphate
  modified_base 15: mod_base = OTHER; note = 2'-O-methylcytidine-3'-phosphate
  modified_base 19: mod_base = OTHER; note = 2'-O-methylcytidine-3'-phosphate
  modified_base 20: mod_base = OTHER; note = deoxy-thymine phosphorothioate
  misc_feature 1..19: note = RNA
  misc_feature 20..21: note = DNA
ttgacaggttcatgcaggctt

SEQ ID NO: 275 - DNA, 21 bp, synthetic construct
  source 1..21: mol_type = other DNA; note = Description of Artificial Sequence: Synthetic oligonucleotide; note = Description of Combined DNA/RNA Molecule: Synthetic oligonucleotide
  modified_base 2: mod_base = OTHER; note = 2'-O-methylcytidine-3'-phosphate
  modified_base 3: mod_base = OTHER; note = 2'-O-methyluridine-3'-phosphate
  modified_base 5: mod_base = OTHER; note = 2'-O-methyluridine-3'-phosphate
  modified_base 8: mod_base = OTHER; note = 2'-O-methylcytidine-3'-phosphate
  modified_base 13: mod_base = OTHER; note = 2'-O-methyluridine-3'-phosphate
  modified_base 20: mod_base = OTHER; note = deoxy-thymine phosphorothioate
  misc_feature 1..19: note = RNA
  misc_feature 20..21: note = DNA
gctgtgacaggatggaagatt

SEQ ID NO: 276 - DNA, 21 bp, synthetic construct
  source 1..21: mol_type = other DNA; note = Description of Artificial Sequence: Synthetic oligonucleotide; note = Description of Combined DNA/RNA Molecule: Synthetic oligonucleotide
  modified_base 4: mod_base = OTHER; note = 2'-O-methyluridine-3'-phosphate
  modified_base 5: mod_base = OTHER; note = 2'-O-methyluridine-3'-phosphate
  modified_base 6: mod_base = OTHER; note = 2'-O-methylcytidine-3'-phosphate
  modified_base 7: mod_base = OTHER; note = 2'-O-methyluridine-3'-phosphate
  modified_base 11: mod_base = OTHER; note = 2'-O-methyluridine-3'-phosphate
  modified_base 15: mod_base = OTHER; note = 2'-O-methylcytidine-3'-phosphate
  modified_base 18: mod_base = OTHER; note = 2'-O-methylcytidine-3'-phosphate
  modified_base 20: mod_base = OTHER; note = deoxy-thymine phosphorothioate
  misc_feature 1..19: note = RNA
  misc_feature 20..21: note = DNA
gagttctgggtggacaacatt

SEQ ID NO: 277 - DNA, 21 bp, synthetic construct
  source 1..21: mol_type = other DNA; note = Description of Artificial Sequence: Synthetic oligonucleotide; note = Description of Combined DNA/RNA Molecule: Synthetic oligonucleotide
  modified_base 1: mod_base = OTHER; note = 2'-O-methylcytidine-3'-phosphate
  modified_base 2: mod_base = OTHER; note = 2'-O-methyluridine-3'-phosphate
  modified_base 6: mod_base = OTHER; note = 2'-O-methyluridine-3'-phosphate
  modified_base 10: mod_base = OTHER; note = 2'-O-methylcytidine-3'-phosphate
  modified_base 13: mod_base = OTHER; note = 2'-O-methylcytidine-3'-phosphate
  modified_base 16: mod_base = OTHER; note = 2'-O-methylcytidine-3'-phosphate
  modified_base 18: mod_base = OTHER; note = 2'-O-methylcytidine-3'-phosphate
  modified_base 19: mod_base = OTHER; note = 2'-O-methylcytidine-3'-phosphate
  modified_base 20: mod_base = OTHER; note = deoxy-thymine phosphorothioate
  misc_feature 1..19: note = RNA
  misc_feature 20..21: note = DNA
ctgggtggacaacagcacctt

SEQ ID NO: 278 - DNA, 21 bp, synthetic construct
  source 1..21: mol_type = other DNA; note = Description of Artificial Sequence: Synthetic oligonucleotide; note = Description of Combined DNA/RNA Molecule: Synthetic oligonucleotide
  modified_base 1: mod_base = OTHER; note = 2'-O-methyluridine-3'-phosphate
  modified_base 5: mod_base = OTHER; note = 2'-O-methylcytidine-3'-phosphate
  modified_base 8: mod_base = OTHER; note = 2'-O-methylcytidine-3'-phosphate
  modified_base 11: mod_base = OTHER; note = 2'-O-methylcytidine-3'-phosphate
  modified_base 13: mod_base = OTHER; note = 2'-O-methylcytidine-3'-phosphate
  modified_base 14: mod_base = OTHER; note = 2'-O-methylcytidine-3'-phosphate
  modified_base 15: mod_base = OTHER; note = 2'-O-methyluridine-3'-phosphate
  modified_base 16: mod_base = OTHER; note = 2'-O-methylcytidine-3'-phosphate
  modified_base 19: mod_base = OTHER; note = 2'-O-methyluridine-3'-phosphate
  modified_base 20: mod_base = OTHER; note = deoxy-thymine phosphorothioate
  misc_feature 1..19: note = RNA
  misc_feature 20..21: note = DNA
tggacaacagcacctcagttt

SEQ ID NO: 279 - DNA, 21 bp, synthetic construct
  source 1..21: mol_type = other DNA; note = Description of Artificial Sequence: Synthetic oligonucleotide; note = Description of Combined DNA/RNA Molecule: Synthetic oligonucleotide
  modified_base 1: mod_base = OTHER; note = 2'-O-methylcytidine-3'-phosphate
  modified_base 4: mod_base = OTHER; note = 2'-O-methylcytidine-3'-phosphate
  modified_base 7: mod_base = OTHER; note = 2'-O-methylcytidine-3'-phosphate
  modified_base 9: mod_base = OTHER; note = 2'-O-methylcytidine-3'-phosphate
  modified_base 10: mod_base = OTHER; note = 2'-O-methylcytidine-3'-phosphate
  modified_base 11: mod_base = OTHER; note = 2'-O-methyluridine-3'-phosphate
  modified_base 12: mod_base = OTHER; note = 2'-O-methylcytidine-3'-phosphate
  modified_base 15: mod_base = OTHER; note = 2'-O-methyluridine-3'-phosphate
  modified_base 17: mod_base = OTHER; note = 2'-O-methyluridine-3'-phosphate
  modified_base 18: mod_base = OTHER; note = 2'-O-methylcytidine-3'-phosphate
  modified_base 19: mod_base = OTHER; note = 2'-O-methyluridine-3'-phosphate
  modified_base 20: mod_base = OTHER; note = deoxy-thymine phosphorothioate
  misc_feature 1..19: note = RNA
  misc_feature 20..21: note = DNA
caacagcacctcagtgtcttt

SEQ ID NO: 280 - DNA, 21 bp, synthetic construct
  source 1..21: mol_type = other DNA; note = Description of Artificial Sequence: Synthetic oligonucleotide; note = Description of Combined DNA/RNA Molecule: Synthetic oligonucleotide
  modified_base 1: mod_base = OTHER; note = 2'-O-methyluridine-3'-phosphate
  modified_base 5: mod_base = OTHER; note = 2'-O-methylcytidine-3'-phosphate
  modified_base 10: mod_base = OTHER; note = 2'-O-methyluridine-3'-phosphate
  modified_base 17: mod_base = OTHER; note = 2'-O-methyluridine-3'-phosphate
  modified_base 18: mod_base = OTHER; note = 2'-O-methylcytidine-3'-phosphate
  modified_base 19: mod_base = OTHER; note = 2'-O-methyluridine-3'-phosphate
  modified_base 20: mod_base = OTHER; note = deoxy-thymine phosphorothioate
  misc_feature 1..19: note = RNA
  misc_feature 20..21: note = DNA
tggacaaggtggagggtcttt

SEQ ID NO: 281 - DNA, 21 bp, synthetic construct
  source 1..21: mol_type = other DNA; note = Description of Artificial Sequence: Synthetic oligonucleotide; note = Description of Combined DNA/RNA Molecule: Synthetic oligonucleotide
  modified_base 1: mod_base = OTHER; note = 2'-O-methylcytidine-3'-phosphate
  modified_base 6: mod_base = OTHER; note = 2'-O-methyluridine-3'-phosphate
  modified_base 13: mod_base = OTHER; note = 2'-O-methyluridine-3'-phosphate
  modified_base 14: mod_base = OTHER; note = 2'-O-methylcytidine-3'-phosphate
  modified_base 15: mod_base = OTHER; note = 2'-O-methyluridine-3'-phosphate
  modified_base 16: mod_base = OTHER; note = 2'-O-methylcytidine-3'-phosphate
  modified_base 18: mod_base = OTHER; note = 2'-O-methylcytidine-3'-phosphate
  modified_base 19: mod_base = OTHER; note = 2'-O-methyluridine-3'-phosphate
  modified_base 20: mod_base = OTHER; note = deoxy-thymine phosphorothioate
  misc_feature 1..19: note = RNA
  misc_feature 20..21: note = DNA
caaggtggagggtctcacttt

SEQ ID NO: 282 - DNA, 21 bp, synthetic construct
  source 1..21: mol_type = other DNA; note = Description of Artificial Sequence: Synthetic oligonucleotide; note = Description of Combined DNA/RNA Molecule: Synthetic oligonucleotide
  modified_base 4: mod_base = OTHER; note = 2'-O-methyluridine-3'-phosphate
  modified_base 11: mod_base = OTHER; note = 2'-O-methyluridine-3'-phosphate
  modified_base 12: mod_base = OTHER; note = 2'-O-methylcytidine-3'-phosphate
  modified_base 13: mod_base = OTHER; note = 2'-O-methyluridine-3'-phosphate
  modified_base 14: mod_base = OTHER; note = 2'-O-methylcytidine-3'-phosphate
  modified_base 16: mod_base = OTHER; note = 2'-O-methylcytidine-3'-phosphate
  modified_base 17: mod_base = OTHER; note = 2'-O-methyluridine-3'-phosphate
  modified_base 18: mod_base = OTHER; note = 2'-O-methyluridine-3'-phosphate
  modified_base 19: mod_base = OTHER; note = 2'-O-methyluridine-3'-phosphate
  modified_base 20: mod_base = OTHER; note = deoxy-thymine phosphorothioate
  misc_feature 1..19: note = RNA
  misc_feature 20..21: note = DNA
aggtggagggtctcacttttt

SEQ ID NO: 283 - DNA, 21 bp, synthetic construct
  source 1..21: mol_type = other DNA; note = Description of Artificial Sequence: Synthetic oligonucleotide; note = Description of Combined DNA/RNA Molecule: Synthetic oligonucleotide
  modified_base 1: mod_base = OTHER; note = 2'-O-methylcytidine-3'-phosphate
  modified_base 2: mod_base = OTHER; note = 2'-O-methyluridine-3'-phosphate
  modified_base 3: mod_base = OTHER; note = 2'-O-methyluridine-3'-phosphate
  modified_base 4: mod_base = OTHER; note = 2'-O-methyluridine-3'-phosphate
  modified_base 5: mod_base = OTHER; note = 2'-O-methylcytidine-3'-phosphate
  modified_base 6: mod_base = OTHER; note = 2'-O-methylcytidine-3'-phosphate
  modified_base 9: mod_base = OTHER; note = 2'-O-methylcytidine-3'-phosphate
  modified_base 14: mod_base = OTHER; note = 2'-O-methylcytidine-3'-phosphate
  modified_base 15: mod_base = OTHER; note = 2'-O-methyluridine-3'-phosphate
  modified_base 16: mod_base = OTHER; note = 2'-O-methylcytidine-3'-phosphate
  modified_base 17: mod_base = OTHER; note = 2'-O-methylcytidine-3'-phosphate
  modified_base 18: mod_base = OTHER; note = 2'-O-methylcytidine-3'-phosphate
  modified_base 19: mod_base = OTHER; note = 2'-O-methyluridine-3'-phosphate
  modified_base 20: mod_base = OTHER; note = deoxy-thymine phosphorothioate
  misc_feature 1..19: note = RNA
  misc_feature 20..21: note = DNA
ctttccagcaaaactcccttt

SEQ ID NO: 284 - DNA, 21 bp, synthetic construct
  source 1..21: mol_type = other DNA; note = Description of Artificial Sequence: Synthetic oligonucleotide; note = Description of Combined DNA/RNA Molecule: Synthetic oligonucleotide
  modified_base 1: mod_base = OTHER; note = 2'-O-methylcytidine-3'-phosphate
  modified_base 2: mod_base = OTHER; note = 2'-O-methylcytidine-3'-phosphate
  modified_base 5: mod_base = OTHER; note = 2'-O-methylcytidine-3'-phosphate
  modified_base 10: mod_base = OTHER; note = 2'-O-methylcytidine-3'-phosphate
  modified_base 11: mod_base = OTHER; note = 2'-O-methyluridine-3'-phosphate
  modified_base 12: mod_base = OTHER; note = 2'-O-methylcytidine-3'-phosphate
  modified_base 13: mod_base = OTHER; note = 2'-O-methylcytidine-3'-phosphate
  modified_base 14: mod_base = OTHER; note = 2'-O-methylcytidine-3'-phosphate
  modified_base 15: mod_base = OTHER; note = 2'-O-methyluridine-3'-phosphate
  modified_base 16: mod_base = OTHER; note = 2'-O-methylcytidine-3'-phosphate
  modified_base 19: mod_base = OTHER; note = 2'-O-methylcytidine-3'-phosphate
  modified_base 20: mod_base = OTHER; note = deoxy-thymine phosphorothioate
  misc_feature 1..19: note = RNA
  misc_feature 20..21: note = DNA
ccagcaaaactccctcaactt

SEQ ID NO: 285 - DNA, 21 bp, synthetic construct
  source 1..21: mol_type = other DNA; note = Description of Artificial Sequence: Synthetic oligonucleotide; note = Description of Combined DNA/RNA Molecule: Synthetic oligonucleotide
  modified_base 1: mod_base = OTHER; note = 2'-O-methylcytidine-3'-phosphate
  modified_base 4: mod_base = OTHER; note = 2'-O-methylcytidine-3'-phosphate
  modified_base 9: mod_base = OTHER; note = 2'-O-methylcytidine-3'-phosphate
  modified_base 10: mod_base = OTHER; note = 2'-O-methyluridine-3'-phosphate
  modified_base 11: mod_base = OTHER; note = 2'-O-methylcytidine-3'-phosphate
  modified_base 12: mod_base = OTHER; note = 2'-O-methylcytidine-3'-phosphate
  modified_base 13: mod_base = OTHER; note = 2'-O-methylcytidine-3'-phosphate
  modified_base 14: mod_base = OTHER; note = 2'-O-methyluridine-3'-phosphate
  modified_base 15: mod_base = OTHER; note = 2'-O-methylcytidine-3'-phosphate
  modified_base 18: mod_base = OTHER; note = 2'-O-methylcytidine-3'-phosphate
  modified_base 19: mod_base = OTHER; note = 2'-O-methyluridine-3'-phosphate
  modified_base 20: mod_base = OTHER; note = deoxy-thymine phosphorothioate
  misc_feature 1..19: note = RNA
  misc_feature 20..21: note = DNA
cagcaaaactccctcaacttt

SEQ ID NO: 286 - DNA, 21 bp, synthetic construct
  source 1..21: mol_type = other DNA; note = Description of Artificial Sequence: Synthetic oligonucleotide; note = Description of Combined DNA/RNA Molecule: Synthetic oligonucleotide
  modified_base 1: mod_base = OTHER; note = 2'-O-methylcytidine-3'-phosphate
  modified_base 6: mod_base = OTHER; note = 2'-O-methylcytidine-3'-phosphate
  modified_base 7: mod_base = OTHER; note = 2'-O-methyluridine-3'-phosphate
  modified_base 8: mod_base = OTHER; note = 2'-O-methylcytidine-3'-phosphate
  modified_base 9: mod_base = OTHER; note = 2'-O-methylcytidine-3'-phosphate
  modified_base 10: mod_base = OTHER; note = 2'-O-methylcytidine-3'-phosphate
  modified_base 11: mod_base = OTHER; note = 2'-O-methyluridine-3'-phosphate
  modified_base 12: mod_base = OTHER; note = 2'-O-methylcytidine-3'-phosphate
  modified_base 15: mod_base = OTHER; note = 2'-O-methylcytidine-3'-phosphate
  modified_base 16: mod_base = OTHER; note = 2'-O-methyluridine-3'-phosphate
  modified_base 20: mod_base = OTHER; note = deoxy-thymine phosphorothioate
  misc_feature 1..19: note = RNA
  misc_feature 20..21: note = DNA
caaaactccctcaactggatt

SEQ ID NO: 287 - DNA, 21 bp, synthetic construct
  source 1..21: mol_type = other DNA; note = Description of Artificial Sequence: Synthetic oligonucleotide; note = Description of Combined DNA/RNA Molecule: Synthetic oligonucleotide
  modified_base 1: mod_base = OTHER; note = 2'-O-methyluridine-3'-phosphate
  modified_base 2: mod_base = OTHER; note = 2'-O-methylcytidine-3'-phosphate
  modified_base 3: mod_base = OTHER; note = 2'-O-methylcytidine-3'-phosphate
  modified_base 4: mod_base = OTHER; note = 2'-O-methylcytidine-3'-phosphate
  modified_base 5: mod_base = OTHER; note = 2'-O-methyluridine-3'-phosphate
  modified_base 6: mod_base = OTHER; note = 2'-O-methylcytidine-3'-phosphate
  modified_base 9: mod_base = OTHER; note = 2'-O-methylcytidine-3'-phosphate
  modified_base 10: mod_base = OTHER; note = 2'-O-methyluridine-3'-phosphate
  modified_base 14: mod_base = OTHER; note = 2'-O-methyluridine-3'-phosphate
  modified_base 20: mod_base = OTHER; note = deoxy-thymine phosphorothioate
  misc_feature 1..19: note = RNA
  misc_feature 20..21: note = DNA
tccctcaactggatgaagatt

SEQ ID NO: 288 - DNA, 21 bp, synthetic construct
  source 1..21: mol_type = other DNA; note = Description of Artificial Sequence: Synthetic oligonucleotide; note = Description of Combined DNA/RNA Molecule: Synthetic oligonucleotide
  modified_base 1: mod_base = OTHER; note = 2'-O-methylcytidine-3'-phosphate
  modified_base 2: mod_base = OTHER; note = 2'-O-methylcytidine-3'-phosphate
  modified_base 3: mod_base = OTHER; note = 2'-O-methylcytidine-3'-phosphate
  modified_base 4: mod_base = OTHER; note = 2'-O-methyluridine-3'-phosphate
  modified_base 5: mod_base = OTHER; note = 2'-O-methylcytidine-3'-phosphate
  modified_base 8: mod_base = OTHER; note = 2'-O-methylcytidine-3'-phosphate
  modified_base 9: mod_base = OTHER; note = 2'-O-methyluridine-3'-phosphate
  modified_base 13: mod_base = OTHER; note = 2'-O-methyluridine-3'-phosphate
  modified_base 20: mod_base = OTHER; note = deoxy-thymine phosphorothioate
  misc_feature 1..19: note = RNA
  misc_feature 20..21: note = DNA
ccctcaactggatgaagaatt

SEQ ID NO: 289 - DNA, 21 bp, synthetic construct
  source 1..21: mol_type = other DNA; note = Description of Artificial Sequence: Synthetic oligonucleotide; note = Description of Combined DNA/RNA Molecule: Synthetic oligonucleotide
  modified_base 1: mod_base = OTHER; note = 2'-O-methyluridine-3'-phosphate
  modified_base 2: mod_base = OTHER; note = 2'-O-methylcytidine-3'-phosphate
  modified_base 5: mod_base = OTHER; note = 2'-O-methylcytidine-3'-phosphate
  modified_base 6: mod_base = OTHER; note = 2'-O-methyluridine-3'-phosphate
  modified_base 10: mod_base = OTHER; note = 2'-O-methyluridine-3'-phosphate
  modified_base 18: mod_base = OTHER; note = 2'-O-methylcytidine-3'-phosphate
  modified_base 19: mod_base = OTHER; note = 2'-O-methyluridine-3'-phosphate
  modified_base 20: mod_base = OTHER; note = deoxy-thymine phosphorothioate
  misc_feature 1..19: note = RNA
  misc_feature 20..21: note = DNA
tcaactggatgaagaaacttt

SEQ ID NO: 290 - DNA, 21 bp, synthetic construct
  source 1..21: mol_type = other DNA; note = Description of Artificial Sequence: Synthetic oligonucleotide; note = Description of Combined DNA/RNA Molecule: Synthetic oligonucleotide
  modified_base 1: mod_base = OTHER; note = 2'-O-methylcytidine-3'-phosphate
  modified_base 2: mod_base = OTHER; note = 2'-O-methylcytidine-3'-phosphate
  modified_base 6: mod_base = OTHER; note = 2'-O-methylcytidine-3'-phosphate
  modified_base 7: mod_base = OTHER; note = 2'-O-methyluridine-3'-phosphate
  modified_base 11: mod_base = OTHER; note = 2'-O-methylcytidine-3'-phosphate
  modified_base 12: mod_base = OTHER; note = 2'-O-methylcytidine-3'-phosphate
  modified_base 13: mod_base = OTHER; note = 2'-O-methyluridine-3'-phosphate
  modified_base 15: mod_base = OTHER; note = 2'-O-methylcytidine-3'-phosphate
  modified_base 20: mod_base = OTHER; note = deoxy-thymine phosphorothioate
  misc_feature 1..19: note = RNA
  misc_feature 20..21: note = DNA
ccgagctgaacctgcaaaatt

SEQ ID NO: 291 - DNA, 21 bp, synthetic construct
  source 1..21: mol_type = other DNA; note = Description of Artificial Sequence: Synthetic oligonucleotide; note = Description of Combined DNA/RNA Molecule: Synthetic oligonucleotide
  modified_base 1: mod_base = OTHER; note = 2'-O-methylcytidine-3'-phosphate
  modified_base 5: mod_base = OTHER; note = 2'-O-methylcytidine-3'-phosphate
  modified_base 6: mod_base = OTHER; note = 2'-O-methyluridine-3'-phosphate
  modified_base 10: mod_base = OTHER; note = 2'-O-methylcytidine-3'-phosphate
  modified_base 11: mod_base = OTHER; note = 2'-O-methylcytidine-3'-phosphate
  modified_base 12: mod_base = OTHER; note = 2'-O-methyluridine-3'-phosphate
  modified_base 14: mod_base = OTHER; note = 2'-O-methylcytidine-3'-phosphate
  modified_base 20: mod_base = OTHER; note = deoxy-thymine phosphorothioate
  misc_feature 1..19: note = RNA
  misc_feature 20..21: note = DNA
cgagctgaacctgcaaaaatt

SEQ ID NO: 292 - DNA, 21 bp, synthetic construct
  source 1..21: mol_type = other DNA; note = Description of Artificial Sequence: Synthetic oligonucleotide; note = Description of Combined DNA/RNA Molecule: Synthetic oligonucleotide
  modified_base 4: mod_base = OTHER; note = 2'-O-methylcytidine-3'-phosphate
  modified_base 5: mod_base = OTHER; note = 2'-O-methylcytidine-3'-phosphate
  modified_base 6: mod_base = OTHER; note = 2'-O-methyluridine-3'-phosphate
  modified_base 8: mod_base = OTHER; note = 2'-O-methylcytidine-3'-phosphate
  modified_base 14: mod_base = OTHER; note = 2'-O-methyluridine-3'-phosphate
  modified_base 15: mod_base = OTHER; note = 2'-O-methyluridine-3'-phosphate
  modified_base 19: mod_base = OTHER; note = 2'-O-methylcytidine-3'-phosphate
  modified_base 20: mod_base = OTHER; note = deoxy-thymine phosphorothioate
  misc_feature 1..19: note = RNA
  misc_feature 20..21: note = DNA
gaacctgcaaaaattgagctt

SEQ ID NO: 293 - DNA, 21 bp, synthetic construct
  source 1..21: mol_type = other DNA; note = Description of Artificial Sequence: Synthetic oligonucleotide; note = Description of Combined DNA/RNA Molecule: Synthetic oligonucleotide
  modified_base 2: mod_base = OTHER; note = 2'-O-methylcytidine-3'-phosphate
  modified_base 3: mod_base = OTHER; note = 2'-O-methylcytidine-3'-phosphate
  modified_base 4: mod_base = OTHER; note = 2'-O-methyluridine-3'-phosphate
  modified_base 6: mod_base = OTHER; note = 2'-O-methylcytidine-3'-phosphate
  modified_base 12: mod_base = OTHER; note = 2'-O-methyluridine-3'-phosphate
  modified_base 13: mod_base = OTHER; note = 2'-O-methyluridine-3'-phosphate
  modified_base 17: mod_base = OTHER; note = 2'-O-methylcytidine-3'-phosphate
  modified_base 20: mod_base = OTHER; note = deoxy-thymine phosphorothioate
  misc_feature 1..19: note = RNA
  misc_feature 20..21: note = DNA
acctgcaaaaattgagcaatt

SEQ ID NO: 294 - DNA, 21 bp, synthetic construct
  source 1..21: mol_type = other DNA; note = Description of Artificial Sequence: Synthetic oligonucleotide; note = Description of Combined DNA/RNA Molecule: Synthetic oligonucleotide
  modified_base 1: mod_base = OTHER; note = 2'-O-methylcytidine-3'-phosphate
  modified_base 2: mod_base = OTHER; note = 2'-O-methylcytidine-3'-phosphate
  modified_base 3: mod_base = OTHER; note = 2'-O-methyluridine-3'-phosphate
  modified_base 5: mod_base = OTHER; note = 2'-O-methylcytidine-3'-phosphate
  modified_base 11: mod_base = OTHER; note = 2'-O-methyluridine-3'-phosphate
  modified_base 12: mod_base = OTHER; note = 2'-O-methyluridine-3'-phosphate
  modified_base 16: mod_base = OTHER; note = 2'-O-methylcytidine-3'-phosphate
  modified_base 19: mod_base = OTHER; note = 2'-O-methyluridine-3'-phosphate
  modified_base 20: mod_base = OTHER; note = deoxy-thymine phosphorothioate
  misc_feature 1..19: note = RNA
  misc_feature 20..21: note = DNA
cctgcaaaaattgagcaattt

SEQ ID NO: 295 - DNA, 21 bp, synthetic construct
  source 1..21: mol_type = other DNA; note = Description of Artificial Sequence: Synthetic oligonucleotide; note = Description of Combined DNA/RNA Molecule: Synthetic oligonucleotide
  modified_base 1: mod_base = OTHER; note = 2'-O-methylcytidine-3'-phosphate
  modified_base 2: mod_base = OTHER; note = 2'-O-methyluridine-3'-phosphate
  modified_base 4: mod_base = OTHER; note = 2'-O-methylcytidine-3'-phosphate
  modified_base 10: mod_base = OTHER; note = 2'-O-methyluridine-3'-phosphate
  modified_base 11: mod_base = OTHER; note = 2'-O-methyluridine-3'-phosphate
  modified_base 15: mod_base = OTHER; note = 2'-O-methylcytidine-3'-phosphate
  modified_base 18: mod_base = OTHER; note = 2'-O-methyluridine-3'-phosphate
  modified_base 20: mod_base = OTHER; note = deoxy-thymine phosphorothioate
  misc_feature 1..19: note = RNA
  misc_feature 20..21: note = DNA
ctgcaaaaattgagcaatgtt

SEQ ID NO: 296 - DNA, 21 bp, synthetic construct
  source 1..21: mol_type = other DNA; note = Description of Artificial Sequence: Synthetic oligonucleotide; note = Description of Combined DNA/RNA Molecule: Synthetic oligonucleotide
  modified_base 1: mod_base = OTHER; note = 2'-O-methyluridine-3'-phosphate
  modified_base 3: mod_base = OTHER; note = 2'-O-methylcytidine-3'-phosphate
  modified_base 9: mod_base = OTHER; note = 2'-O-methyluridine-3'-phosphate
  modified_base 10: mod_base = OTHER; note = 2'-O-methyluridine-3'-phosphate
  modified_base 14: mod_base = OTHER; note = 2'-O-methylcytidine-3'-phosphate
  modified_base 17: mod_base = OTHER; note = 2'-O-methyluridine-3'-phosphate
  modified_base 20: mod_base = OTHER; note = deoxy-thymine phosphorothioate
  misc_feature 1..19: note = RNA
  misc_feature 20..21: note = DNA
tgcaaaaattgagcaatgatt

SEQ ID NO: 297 - DNA, 21 bp, synthetic construct
  source 1..21: mol_type = other DNA; note = Description of Artificial Sequence: Synthetic oligonucleotide; note = Description of Combined DNA/RNA Molecule: Synthetic oligonucleotide
  modified_base 2: mod_base = OTHER; note = 2'-O-methylcytidine-3'-phosphate
  modified_base 8: mod_base = OTHER; note = 2'-O-methyluridine-3'-phosphate
  modified_base 9: mod_base = OTHER; note = 2'-O-methyluridine-3'-phosphate
  modified_base 13: mod_base = OTHER; note = 2'-O-methylcytidine-3'-phosphate
  modified_base 16: mod_base = OTHER; note = 2'-O-methyluridine-3'-phosphate
  modified_base 19: mod_base = OTHER; note = 2'-O-methylcytidine-3'-phosphate
  modified_base 20: mod_base = OTHER; note = deoxy-thymine phosphorothioate
  misc_feature 1..19: note = RNA
  misc_feature 20..21: note = DNA
gcaaaaattgagcaatgactt

SEQ ID NO: 298 - DNA, 21 bp, synthetic construct
  source 1..21: mol_type = other DNA; note = Description of Artificial Sequence: Synthetic oligonucleotide; note = Description of Combined DNA/RNA Molecule: Synthetic oligonucleotide
  modified_base 4: mod_base = OTHER; note = 2'-O-methyluridine-3'-phosphate
  modified_base 13: mod_base = OTHER; note = 2'-O-methyluridine-3'-phosphate
  modified_base 15: mod_base = OTHER; note = 2'-O-methylcytidine-3'-phosphate
  modified_base 16: mod_base = OTHER; note = 2'-O-methyluridine-3'-phosphate
  modified_base 20: mod_base = OTHER; note = deoxy-thymine phosphorothioate
  misc_feature 1..19: note = RNA
  misc_feature 20..21: note = DNA
gggtgggggaggtgctgaatt

SEQ ID NO: 299 - DNA, 21 bp, synthetic construct
  source 1..21: mol_type = other DNA; note = Description of Artificial Sequence: Synthetic oligonucleotide; note = Description of Combined DNA/RNA Molecule: Synthetic oligonucleotide
  modified_base 4: mod_base = OTHER; note = 2'-O-methyluridine-3'-phosphate
  modified_base 14: mod_base = OTHER; note = 2'-O-methylcytidine-3'-phosphate
  modified_base 15: mod_base = OTHER; note = 2'-O-methylcytidine-3'-phosphate
  modified_base 16: mod_base = OTHER; note = 2'-O-methylcytidine-3'-phosphate
  modified_base 18: mod_base = OTHER; note = 2'-O-methylcytidine-3'-phosphate
  modified_base 20: mod_base = OTHER; note = deoxy-thymine phosphorothioate
  misc_feature 1..19: note = RNA
  misc_feature 20..21: note = DNA
ggatgagagagagcccacatt

SEQ ID NO: 300 - DNA, 21 bp, synthetic construct
  source 1..21: mol_type = other DNA; note = Description of Artificial Sequence: Synthetic oligonucleotide; note = Description of Combined DNA/RNA Molecule: Synthetic oligonucleotide
  modified_base 1: mod_base = OTHER; note = 2'-O-methylcytidine-3'-phosphate
  modified_base 2: mod_base = OTHER; note = 2'-O-methylcytidine-3'-phosphate
  modified_base 4: mod_base = OTHER; note = 2'-O-methylcytidine-3'-phosphate
  modified_base 5: mod_base = OTHER; note = 2'-O-methylcytidine-3'-phosphate
  modified_base 6: mod_base = OTHER; note = 2'-O-methylcytidine-3'-phosphate
  modified_base 8: mod_base = OTHER; note = 2'-O-methyluridine-3'-phosphate
  modified_base 9: mod_base = OTHER; note = 2'-O-methyluridine-3'-phosphate
  modified_base 10: mod_base = OTHER; note = 2'-O-methylcytidine-3'-phosphate
  modified_base 11: mod_base = OTHER; note = 2'-O-methylcytidine-3'-phosphate
  modified_base 12: mod_base = OTHER; note = 2'-O-methyluridine-3'-phosphate
  modified_base 14: mod_base = OTHER; note = 2'-O-methyluridine-3'-phosphate
  modified_base 15: mod_base = OTHER; note = 2'-O-methyluridine-3'-phosphate
  modified_base 16: mod_base = OTHER; note = 2'-O-methyluridine-3'-phosphate
  modified_base 18: mod_base = OTHER; note = 2'-O-methylcytidine-3'-phosphate
  modified_base 19: mod_base = OTHER; note = 2'-O-methyluridine-3'-phosphate
  modified_base 20: mod_base = OTHER; note = deoxy-thymine phosphorothioate
  misc_feature 1..19: note = RNA
  misc_feature 20..21: note = DNA
ccgcccattcctgtttgcttt

SEQ ID NO: 301 - DNA, 21 bp, synthetic construct
  source 1..21: mol_type = other DNA; note = Description of Artificial Sequence: Synthetic oligonucleotide; note = Description of Combined DNA/RNA Molecule: Synthetic oligonucleotide
  modified_base 2: mod_base = OTHER; note = 2'-O-methyluridine-3'-phosphate
  modified_base 3: mod_base = OTHER; note = 2'-O-methyluridine-3'-phosphate
  modified_base 4: mod_base = OTHER; note = 2'-O-methylcytidine-3'-phosphate
  modified_base 5: mod_base = OTHER; note = 2'-O-methylcytidine-3'-phosphate
  modified_base 6: mod_base = OTHER; note = 2'-O-methyluridine-3'-phosphate
  modified_base 8: mod_base = OTHER; note = 2'-O-methyluridine-3'-phosphate
  modified_base 9: mod_base = OTHER; note = 2'-O-methyluridine-3'-phosphate
  modified_base 10: mod_base = OTHER; note = 2'-O-methyluridine-3'-phosphate
  modified_base 12: mod_base = OTHER; note = 2'-O-methylcytidine-3'-phosphate
  modified_base 13: mod_base = OTHER; note = 2'-O-methyluridine-3'-phosphate
  modified_base 15: mod_base = OTHER; note = 2'-O-methyluridine-3'-phosphate
  modified_base 17: mod_base = OTHER; note = 2'-O-methyluridine-3'-phosphate
  modified_base 19: mod_base = OTHER; note = 2'-O-methyluridine-3'-phosphate
  modified_base 20: mod_base = OTHER; note = deoxy-thymine phosphorothioate
  misc_feature 1..19: note = RNA
  misc_feature 20..21: note = DNA
attcctgtttgctgtgtattt

SEQ ID NO: 302 - DNA, 21 bp, synthetic construct
  source 1..21: mol_type = other DNA; note = Description of Artificial Sequence: Synthetic oligonucleotide; note = Description of Combined DNA/RNA Molecule: Synthetic oligonucleotide
  modified_base 1: mod_base = OTHER; note = 2'-O-methyluridine-3'-phosphate
  modified_base 2: mod_base = OTHER; note = 2'-O-methylcytidine-3'-phosphate
  modified_base 3: mod_base = OTHER; note = 2'-O-methylcytidine-3'-phosphate
  modified_base 4: mod_base = OTHER; note = 2'-O-methyluridine-3'-phosphate
  modified_base 6: mod_base = OTHER; note = 2'-O-methyluridine-3'-phosphate
  modified_base 7: mod_base = OTHER; note = 2'-O-methyluridine-3'-phosphate
  modified_base 8: mod_base = OTHER; note = 2'-O-methyluridine-3'-phosphate
  modified_base 10: mod_base = OTHER; note = 2'-O-methylcytidine-3'-phosphate
  modified_base 11: mod_base = OTHER; note = 2'-O-methyluridine-3'-phosphate
  modified_base 13: mod_base = OTHER; note = 2'-O-methyluridine-3'-phosphate
  modified_base 15: mod_base = OTHER; note = 2'-O-methyluridine-3'-phosphate
  modified_base 17: mod_base = OTHER; note = 2'-O-methyluridine-3'-phosphate
  modified_base 20: mod_base = OTHER; note = deoxy-thymine phosphorothioate
  misc_feature 1..19: note = RNA
  misc_feature 20..21: note = DNA
tcctgtttgctgtgtatgatt

SEQ ID NO: 303 - DNA, 21 bp, synthetic construct
  source 1..21: mol_type = other DNA; note = Description of Artificial Sequence: Synthetic oligonucleotide; note = Description of Combined DNA/RNA Molecule: Synthetic oligonucleotide
  modified_base 2: mod_base = OTHER; note = 2'-O-methyluridine-3'-phosphate
  modified_base 3: mod_base = OTHER; note = 2'-O-methyluridine-3'-phosphate
  modified_base 4: mod_base = OTHER; note = 2'-O-methyluridine-3'-phosphate
  modified_base 6: mod_base = OTHER; note = 2'-O-methylcytidine-3'-phosphate
  modified_base 7: mod_base = OTHER; note = 2'-O-methyluridine-3'-phosphate
  modified_base 9: mod_base = OTHER; note = 2'-O-methyluridine-3'-phosphate
  modified_base 11: mod_base = OTHER; note = 2'-O-methyluridine-3'-phosphate
  modified_base 13: mod_base = OTHER; note = 2'-O-methyluridine-3'-phosphate
  modified_base 16: mod_base = OTHER; note = 2'-O-methyluridine-3'-phosphate
  modified_base 17: mod_base = OTHER; note = 2'-O-methylcytidine-3'-phosphate
  modified_base 20: mod_base = OTHER; note = deoxy-thymine phosphorothioate
  misc_feature 1..19: note = RNA
  misc_feature 20..21: note = DNA
gtttgctgtgtatgatcaatt

SEQ ID NO: 304 - DNA, 21 bp, synthetic construct
  source 1..21: mol_type = other DNA; note = Description of Artificial Sequence: Synthetic oligonucleotide; note = Description of Combined DNA/RNA Molecule: Synthetic oligonucleotide
  modified_base 1: mod_base = OTHER; note = 2'-O-methyluridine-3'-phosphate
  modified_base 2: mod_base = OTHER; note = 2'-O-methyluridine-3'-phosphate
  modified_base 3: mod_base = OTHER; note = 2'-O-methyluridine-3'-phosphate
  modified_base 5: mod_base = OTHER; note = 2'-O-methylcytidine-3'-phosphate
  modified_base 6: mod_base = OTHER; note = 2'-O-methyluridine-3'-phosphate
  modified_base 8: mod_base = OTHER; note = 2'-O-methyluridine-3'-phosphate
  modified_base 10: mod_base = OTHER; note = 2'-O-methyluridine-3'-phosphate
  modified_base 12: mod_base = OTHER; note = 2'-O-methyluridine-3'-phosphate
  modified_base 15: mod_base = OTHER; note = 2'-O-methyluridine-3'-phosphate
  modified_base 16: mod_base = OTHER; note = 2'-O-methylcytidine-3'-phosphate
  modified_base 20: mod_base = OTHER; note = deoxy-thymine phosphorothioate
  misc_feature 1..19: note = RNA
  misc_feature 20..21: note = DNA
tttgctgtgtatgatcaaatt

SEQ ID NO: 305 - DNA, 21 bp, synthetic construct
  source 1..21: mol_type = other DNA; note = Description of Artificial Sequence: Synthetic oligonucleotide; note = Description of Combined DNA/RNA Molecule: Synthetic oligonucleotide
  modified_base 1: mod_base = OTHER; note = 2'-O-methylcytidine-3'-phosphate
  modified_base 2: mod_base = OTHER; note = 2'-O-methylcytidine-3'-phosphate
  modified_base 3: mod_base = OTHER; note = 2'-O-methylcytidine-3'-phosphate
  modified_base 4: mod_base = OTHER; note = 2'-O-methylcytidine-3'-phosphate
  modified_base 5: mod_base = OTHER; note = 2'-O-methylcytidine-3'-phosphate
  modified_base 8: mod_base = OTHER; note = 2'-O-methyluridine-3'-phosphate
  modified_base 9: mod_base = OTHER; note = 2'-O-methylcytidine-3'-phosphate
  modified_base 10: mod_base = OTHER; note = 2'-O-methyluridine-3'-phosphate
  modified_base 11: mod_base = OTHER; note = 2'-O-methylcytidine-3'-phosphate
  modified_base 12: mod_base = OTHER; note = 2'-O-methylcytidine-3'-phosphate
  modified_base 13: mod_base = OTHER; note = 2'-O-methylcytidine-3'-phosphate
  modified_base 15: mod_base = OTHER; note = 2'-O-methylcytidine-3'-phosphate
  modified_base 16: mod_base = OTHER; note = 2'-O-methylcytidine-3'-phosphate
  modified_base 17: mod_base = OTHER; note = 2'-O-methyluridine-3'-phosphate
  modified_base 18: mod_base = OTHER; note = 2'-O-methyluridine-3'-phosphate
  modified_base 19: mod_base = OTHER; note = 2'-O-methyluridine-3'-phosphate
  modified_base 20: mod_base = OTHER; note = deoxy-thymine phosphorothioate
  misc_feature 1..19: note = RNA
  misc_feature 20..21: note = DNA
cccccagtctcccaccttttt

SEQ ID NO: 306 - DNA, 21 bp, synthetic construct
  source 1..21: mol_type = other DNA; note = Description of Artificial Sequence: Synthetic oligonucleotide; note = Description of Combined DNA/RNA Molecule: Synthetic oligonucleotide
  modified_base 1: mod_base = OTHER; note = 2'-O-methylcytidine-3'-phosphate
  modified_base 2: mod_base = OTHER; note = 2'-O-methylcytidine-3'-phosphate
  modified_base 3: mod_base = OTHER; note = 2'-O-methylcytidine-3'-phosphate
  modified_base 5: mod_base = OTHER; note = 2'-O-methylcytidine-3'-phosphate
  modified_base 6: mod_base = OTHER; note = 2'-O-methylcytidine-3'-phosphate
  modified_base 7: mod_base = OTHER; note = 2'-O-methyluridine-3'-phosphate
  modified_base 8: mod_base = OTHER; note = 2'-O-methyluridine-3'-phosphate
  modified_base 9: mod_base = OTHER; note = 2'-O-methyluridine-3'-phosphate
  modified_base 10: mod_base = OTHER; note = 2'-O-methyluridine-3'-phosphate
  modified_base 11: mod_base = OTHER; note = 2'-O-methylcytidine-3'-phosphate
  modified_base 12: mod_base = OTHER; note = 2'-O-methyluridine-3'-phosphate
  modified_base 13: mod_base = OTHER; note = 2'-O-methyluridine-3'-phosphate
  modified_base 14: mod_base = OTHER; note = 2'-O-methylcytidine-3'-phosphate
  modified_base 15: mod_base = OTHER; note = 2'-O-methyluridine-3'-phosphate
  modified_base 18: mod_base = OTHER; note = 2'-O-methyluridine-3'-phosphate
  modified_base 20: mod_base = OTHER; note = deoxy-thymine phosphorothioate
  misc_feature 1..19: note = RNA
  misc_feature 20..21: note = DNA
cccaccttttcttctaatgtt

SEQ ID NO: 307 - DNA, 21 bp, synthetic construct
  source 1..21: mol_type = other DNA; note = Description of Artificial Sequence: Synthetic oligonucleotide; note = Description of Combined DNA/RNA Molecule: Synthetic oligonucleotide
  modified_base 1: mod_base = OTHER; note = 2'-O-methylcytidine-3'-phosphate
  modified_base 2: mod_base = OTHER; note = 2'-O-methylcytidine-3'-phosphate
  modified_base 4: mod_base = OTHER; note = 2'-O-methylcytidine-3'-phosphate
  modified_base 5: mod_base = OTHER; note = 2'-O-methylcytidine-3'-phosphate
  modified_base 6: mod_base = OTHER; note = 2'-O-methyluridine-3'-phosphate
  modified_base 7: mod_base = OTHER; note = 2'-O-methyluridine-3'-phosphate
  modified_base 8: mod_base = OTHER; note = 2'-O-methyluridine-3'-phosphate
  modified_base 9: mod_base = OTHER; note = 2'-O-methyluridine-3'-phosphate
  modified_base 10: mod_base = OTHER; note = 2'-O-methylcytidine-3'-phosphate
  modified_base 11: mod_base = OTHER; note = 2'-O-methyluridine-3'-phosphate
  modified_base 12: mod_base = OTHER; note = 2'-O-methyluridine-3'-phosphate
  modified_base 13: mod_base = OTHER; note = 2'-O-methylcytidine-3'-phosphate
  modified_base 14: mod_base = OTHER; note = 2'-O-methyluridine-3'-phosphate
  modified_base 17: mod_base = OTHER; note = 2'-O-methyluridine-3'-phosphate
  modified_base 20: mod_base = OTHER; note = deoxy-thymine phosphorothioate
  misc_feature 1..19: note = RNA
  misc_feature 20..21: note = DNA
ccaccttttcttctaatgatt

SEQ ID NO: 308 - DNA, 21 bp, synthetic construct
  source 1..21: mol_type = other DNA; note = Description of Artificial Sequence: Synthetic oligonucleotide; note = Description of Combined DNA/RNA Molecule: Synthetic oligonucleotide
  modified_base 1: mod_base = OTHER; note = 2'-O-methylcytidine-3'-phosphate
  modified_base 3: mod_base = OTHER; note = 2'-O-methylcytidine-3'-phosphate
  modified_base 4: mod_base = OTHER; note = 2'-O-methylcytidine-3'-phosphate
  modified_base 5: mod_base = OTHER; note = 2'-O-methyluridine-3'-phosphate
  modified_base 6: mod_base = OTHER; note = 2'-O-methyluridine-3'-phosphate
  modified_base 7: mod_base = OTHER; note = 2'-O-methyluridine-3'-phosphate
  modified_base 8: mod_base = OTHER; note = 2'-O-methyluridine-3'-phosphate
  modified_base 9: mod_base = OTHER; note = 2'-O-methylcytidine-3'-phosphate
  modified_base 10: mod_base = OTHER; note = 2'-O-methyluridine-3'-phosphate
  modified_base 11: mod_base = OTHER; note = 2'-O-methyluridine-3'-phosphate
  modified_base 12: mod_base = OTHER; note = 2'-O-methylcytidine-3'-phosphate
  modified_base 13: mod_base = OTHER; note = 2'-O-methyluridine-3'-phosphate
  modified_base 16: mod_base = OTHER; note = 2'-O-methyluridine-3'-phosphate
  modified_base 20: mod_base = OTHER; note = deoxy-thymine phosphorothioate
  misc_feature 1..19: note = RNA
  misc_feature 20..21: note = DNA
caccttttcttctaatgagtt

SEQ ID NO: 309 - DNA, 21 bp, synthetic construct
  source 1..21: mol_type = other DNA; note = Description of Artificial Sequence: Synthetic oligonucleotide; note = Description of Combined DNA/RNA Molecule: Synthetic oligonucleotide
  modified_base 2: mod_base = OTHER; note = 2'-O-methyluridine-3'-phosphate
  modified_base 3: mod_base = OTHER; note = 2'-O-methyluridine-3'-phosphate
  modified_base 4: mod_base = OTHER; note = 2'-O-methyluridine-3'-phosphate
  modified_base 5: mod_base = OTHER; note = 2'-O-methylcytidine-3'-phosphate
  modified_base 6: mod_base = OTHER; note = 2'-O-methyluridine-3'-phosphate
  modified_base 7: mod_base = OTHER; note = 2'-O-methylcytidine-3'-phosphate
  modified_base 8: mod_base = OTHER; note = 2'-O-methylcytidine-3'-phosphate
  modified_base 9: mod_base = OTHER; note = 2'-O-methyluridine-3'-phosphate
  modified_base 10: mod_base = OTHER; note = 2'-O-methyluridine-3'-phosphate
  modified_base 13: mod_base = OTHER; note = 2'-O-methyluridine-3'-phosphate
  modified_base 14: mod_base = OTHER; note = 2'-O-methylcytidine-3'-phosphate
  modified_base 15: mod_base = OTHER; note = 2'-O-methyluridine-3'-phosphate
  modified_base 19: mod_base = OTHER; note = 2'-O-methyluridine-3'-phosphate
  modified_base 20: mod_base = OTHER; note = deoxy-thymine phosphorothioate
  misc_feature 1..19: note = RNA
  misc_feature 20..21: note = DNA
gtttctccttggtctaagttt

SEQ ID NO: 310 - DNA, 21 bp, synthetic construct
  source 1..21: mol_type = other DNA; note = Description of Artificial Sequence: Synthetic oligonucleotide; note = Description of Combined DNA/RNA Molecule: Synthetic oligonucleotide
  modified_base 1: mod_base = OTHER; note = 2'-O-methyluridine-3'-phosphate
  modified_base 2: mod_base = OTHER; note = 2'-O-methyluridine-3'-phosphate
  modified_base 4: mod_base = OTHER; note = 2'-O-methylcytidine-3'-phosphate
  modified_base 5: mod_base = OTHER; note = 2'-O-methyluridine-3'-phosphate
  modified_base 9: mod_base = OTHER; note = 2'-O-methyluridine-3'-phosphate
  modified_base 10: mod_base = OTHER; note = 2'-O-methyluridine-3'-phosphate
  modified_base 11: mod_base = OTHER; note = 2'-O-methyluridine-3'-phosphate
  modified_base 13: mod_base = OTHER; note = 2'-O-methyluridine-3'-phosphate
  modified_base 14: mod_base = OTHER; note = 2'-O-methyluridine-3'-phosphate
  modified_base 15: mod_base = OTHER; note = 2'-O-methyluridine-3'-phosphate
  modified_base 16: mod_base = OTHER; note = 2'-O-methyluridine-3'-phosphate
  modified_base 20: mod_base = OTHER; note = deoxy-thymine phosphorothioate
  misc_feature 1..19: note = RNA
  misc_feature 20..21: note = DNA
ttgctgggtttattttagatt

SEQ ID NO: 311 - DNA, 21 bp, synthetic construct
  source 1..21: mol_type = other DNA; note = Description of Artificial Sequence: Synthetic oligonucleotide; note = Description of Combined DNA/RNA Molecule: Synthetic oligonucleotide
  modified_base 1: mod_base = OTHER; note = 2'-O-methyluridine-3'-phosphate
  modified_base 3: mod_base = OTHER; note = 2'-O-methylcytidine-3'-phosphate
  modified_base 4: mod_base = OTHER; note = 2'-O-methyluridine-3'-phosphate
  modified_base 8: mod_base = OTHER; note = 2'-O-methyluridine-3'-phosphate
  modified_base 9: mod_base = OTHER; note = 2'-O-methyluridine-3'-phosphate
  modified_base 10: mod_base = OTHER; note = 2'-O-methyluridine-3'-phosphate
  modified_base 12: mod_base = OTHER; note = 2'-O-methyluridine-3'-phosphate
  modified_base 13: mod_base = OTHER; note = 2'-O-methyluridine-3'-phosphate
  modified_base 14: mod_base = OTHER; note = 2'-O-methyluridine-3'-phosphate
  modified_base 15: mod_base = OTHER; note = 2'-O-methyluridine-3'-phosphate
  modified_base 20: mod_base = OTHER; note = deoxy-thymine phosphorothioate
  misc_feature 1..19: note = RNA
  misc_feature 20..21: note = DNA
tgctgggtttattttagagtt

SEQ ID NO: 312 - DNA, 21 bp, synthetic construct
  source 1..21: mol_type = other DNA; note = Description of Artificial Sequence: Synthetic oligonucleotide; note = Description of Combined DNA/RNA Molecule: Synthetic oligonucleotide
  modified_base 2: mod_base = OTHER; note = 2'-O-methylcytidine-3'-phosphate
  modified_base 3: mod_base = OTHER; note = 2'-O-methyluridine-3'-phosphate
  modified_base 7: mod_base = OTHER; note = 2'-O-methyluridine-3'-phosphate
  modified_base 8: mod_base = OTHER; note = 2'-O-methyluridine-3'-phosphate
  modified_base 9: mod_base = OTHER; note = 2'-O-methyluridine-3'-phosphate
  modified_base 11: mod_base = OTHER; note = 2'-O-methyluridine-3'-phosphate
  modified_base 12: mod_base = OTHER; note = 2'-O-methyluridine-3'-phosphate
  modified_base 13: mod_base = OTHER; note = 2'-O-methyluridine-3'-phosphate
  modified_base 14: mod_base = OTHER; note = 2'-O-methyluridine-3'-phosphate
  modified_base 20: mod_base = OTHER; note = deoxy-thymine phosphorothioate
  misc_feature 1..19: note = RNA
  misc_feature 20..21: note = DNA
gctgggtttattttagagatt

SEQ ID NO: 313 - DNA, 21 bp, synthetic construct
  source 1..21: mol_type = other DNA; note = Description of Artificial Sequence: Synthetic oligonucleotide; note = Description of Combined DNA/RNA Molecule: Synthetic oligonucleotide
  modified_base 1: mod_base = OTHER; note = 2'-O-methylcytidine-3'-phosphate
  modified_base 2: mod_base = OTHER; note = 2'-O-methyluridine-3'-phosphate
  modified_base 6: mod_base = OTHER; note = 2'-O-methyluridine-3'-phosphate
  modified_base 7: mod_base = OTHER; note = 2'-O-methyluridine-3'-phosphate
  modified_base 8: mod_base = OTHER; note = 2'-O-methyluridine-3'-phosphate
  modified_base 10: mod_base = OTHER; note = 2'-O-methyluridine-3'-phosphate
  modified_base 11: mod_base = OTHER; note = 2'-O-methyluridine-3'-phosphate
  modified_base 12: mod_base = OTHER; note = 2'-O-methyluridine-3'-phosphate
  modified_base 13: mod_base = OTHER; note = 2'-O-methyluridine-3'-phosphate
  modified_base 20: mod_base = OTHER; note = deoxy-thymine phosphorothioate
  misc_feature 1..19: note = RNA
  misc_feature 20..21: note = DNA
ctgggtttattttagagaatt

SEQ ID NO: 314 - DNA, 21 bp, synthetic construct
  source 1..21: mol_type = other DNA; note = Description of Artificial Sequence: Synthetic oligonucleotide; note = Description of Combined DNA/RNA Molecule: Synthetic oligonucleotide
  modified_base 1: mod_base = OTHER; note = 2'-O-methyluridine-3'-phosphate
  modified_base 5: mod_base = OTHER; note = 2'-O-methyluridine-3'-phosphate
  modified_base 6: mod_base = OTHER; note = 2'-O-methyluridine-3'-phosphate
  modified_base 7: mod_base = OTHER; note = 2'-O-methyluridine-3'-phosphate
  modified_base 9: mod_base = OTHER; note = 2'-O-methyluridine-3'-phosphate
  modified_base 10: mod_base = OTHER; note = 2'-O-methyluridine-3'-phosphate
  modified_base 11: mod_base = OTHER; note = 2'-O-methyluridine-3'-phosphate
  modified_base 12: mod_base = OTHER; note = 2'-O-methyluridine-3'-phosphate
  modified_base 19: mod_base = OTHER; note = 2'-O-methyluridine-3'-phosphate
  modified_base 20: mod_base = OTHER; note = deoxy-thymine phosphorothioate
  misc_feature 1..19: note = RNA
  misc_feature 20..21: note = DNA
tgggtttattttagagaattt

SEQ ID NO: 315 - DNA, 21 bp, synthetic construct
  source 1..21: mol_type = other DNA; note = Description of Artificial Sequence: Synthetic oligonucleotide; note = Description of Combined DNA/RNA Molecule: Synthetic oligonucleotide
  modified_base 2: mod_base = OTHER; note = 2'-O-methyluridine-3'-phosphate
  modified_base 3: mod_base = OTHER; note = 2'-O-methyluridine-3'-phosphate
  modified_base 4: mod_base = OTHER; note = 2'-O-methyluridine-3'-phosphate
  modified_base 6: mod_base = OTHER; note = 2'-O-methyluridine-3'-phosphate
  modified_base 7: mod_base = OTHER; note = 2'-O-methyluridine-3'-phosphate
  modified_base 8: mod_base = OTHER; note = 2'-O-methyluridine-3'-phosphate
  modified_base 9: mod_base = OTHER; note = 2'-O-methyluridine-3'-phosphate
  modified_base 16: mod_base = OTHER; note = 2'-O-methyluridine-3'-phosphate
  modified_base 20: mod_base = OTHER; note = deoxy-thymine phosphorothioate
  misc_feature 1..19: note = RNA
  misc_feature 20..21: note = DNA
gtttattttagagaatgggtt

SEQ ID NO: 316 - DNA, 21 bp, synthetic construct
  source 1..21: mol_type = other DNA; note = Description of Artificial Sequence: Synthetic oligonucleotide; note = Description of Combined DNA/RNA Molecule: Synthetic oligonucleotide
  modified_base 1: mod_base = OTHER; note = 2'-O-methyluridine-3'-phosphate
  modified_base 3: mod_base = OTHER; note = 2'-O-methyluridine-3'-phosphate
  modified_base 4: mod_base = OTHER; note = 2'-O-methyluridine-3'-phosphate
  modified_base 5: mod_base = OTHER; note = 2'-O-methyluridine-3'-phosphate
  modified_base 6: mod_base = OTHER; note = 2'-O-methyluridine-3'-phosphate
  modified_base 13: mod_base = OTHER; note = 2'-O-methyluridine-3'-phosphate
  modified_base 19: mod_base = OTHER; note = 2'-O-methyluridine-3'-phosphate
  modified_base 20: mod_base = OTHER; note = deoxy-thymine phosphorothioate
  misc_feature 1..19: note = RNA
  misc_feature 20..21: note = DNA
tattttagagaatgggggttt

SEQ ID NO: 317 - DNA, 21 bp, synthetic construct
  source 1..21: mol_type = other DNA; note = Description of Artificial Sequence: Synthetic oligonucleotide; note = Description of Combined DNA/RNA Molecule: Synthetic oligonucleotide
  modified_base 1: mod_base = OTHER; note = 2'-O-methyluridine-3'-phosphate
  modified_base 9: mod_base = OTHER; note = 2'-O-methylcytidine-3'-phosphate
  modified_base 15: mod_base = OTHER; note = 2'-O-methylcytidine-3'-phosphate
  modified_base 16: mod_base = OTHER; note = 2'-O-methylcytidine-3'-phosphate
  modified_base 19: mod_base = OTHER; note = 2'-O-methyluridine-3'-phosphate
  modified_base 20: mod_base = OTHER; note = deoxy-thymine phosphorothioate
  misc_feature 1..19: note = RNA
  misc_feature 20..21: note = DNA
tggggaggcaagaaccagttt

SEQ ID NO: 318 - DNA, 21 bp, synthetic construct
  source 1..21: mol_type = other DNA; note = Description of Artificial Sequence: Synthetic oligonucleotide; note = Description of Combined DNA/RNA Molecule: Synthetic oligonucleotide
  modified_base 6: mod_base = OTHER; note = 2'-O-methylcytidine-3'-phosphate
  modified_base 12: mod_base = OTHER; note = 2'-O-methylcytidine-3'-phosphate
  modified_base 13: mod_base = OTHER; note = 2'-O-methylcytidine-3'-phosphate
  modified_base 16: mod_base = OTHER; note = 2'-O-methyluridine-3'-phosphate
  modified_base 18: mod_base = OTHER; note = 2'-O-methyluridine-3'-phosphate
  modified_base 19: mod_base = OTHER; note = 2'-O-methyluridine-3'-phosphate
  modified_base 20: mod_base = OTHER; note = deoxy-thymine phosphorothioate
  misc_feature 1..19: note = RNA
  misc_feature 20..21: note = DNA
ggaggcaagaaccagtgtttt

SEQ ID NO: 319 - DNA, 21 bp, synthetic construct
  source 1..21: mol_type = other DNA; note = Description of Artificial Sequence: Synthetic oligonucleotide; note = Description of Combined DNA/RNA Molecule: Synthetic oligonucleotide
  modified_base 1: mod_base = OTHER; note = 2'-O-methyluridine-3'-phosphate
  modified_base 2: mod_base = OTHER; note = 2'-O-methylcytidine-3'-phosphate
  modified_base 3: mod_base = OTHER; note = 2'-O-methylcytidine-3'-phosphate
  modified_base 12: mod_base = OTHER; note = 2'-O-methyluridine-3'-phosphate
  modified_base 13: mod_base = OTHER; note = 2'-O-methyluridine-3'-phosphate
  modified_base 14: mod_base = OTHER; note = 2'-O-methylcytidine-3'-phosphate
  modified_base 15: mod_base = OTHER; note = 2'-O-methylcytidine-3'-phosphate
  modified_base 18: mod_base = OTHER; note = 2'-O-methylcytidine-3'-phosphate
  modified_base 19: mod_base = OTHER; note = 2'-O-methylcytidine-3'-phosphate
  modified_base 20: mod_base = OTHER; note = deoxy-thymine phosphorothioate
  misc_feature 1..19: note = RNA
  misc_feature 20..21: note = DNA
tccaaaaagaattccaacctt

SEQ ID NO: 320 - DNA, 21 bp, synthetic construct
  source 1..21: mol_type = other DNA; note = Description of Artificial Sequence: Synthetic oligonucleotide; note = Description of Combined DNA/RNA Molecule: Synthetic oligonucleotide
  modified_base 1: mod_base = OTHER; note = 2'-O-methylcytidine-3'-phosphate
  modified_base 10: mod_base = OTHER; note = 2'-O-methyluridine-3'-phosphate
  modified_base 11: mod_base = OTHER; note = 2'-O-methyluridine-3'-phosphate
  modified_base 12: mod_base = OTHER; note = 2'-O-methylcytidine-3'-phosphate
  modified_base 13: mod_base = OTHER; note = 2'-O-methylcytidine-3'-phosphate
  modified_base 16: mod_base = OTHER; note = 2'-O-methylcytidine-3'-phosphate
  modified_base 17: mod_base = OTHER; note = 2'-O-methylcytidine-3'-phosphate
  modified_base 20: mod_base = OTHER; note = deoxy-thymine phosphorothioate
  misc_feature 1..19: note = RNA
  misc_feature 20..21: note = DNA
caaaaagaattccaaccgatt

SEQ ID NO: 321 - DNA, 21 bp, synthetic construct
  source 1..21: mol_type = other DNA; note = Description of Artificial Sequence: Synthetic oligonucleotide; note = Description of Combined DNA/RNA Molecule: Synthetic oligonucleotide
  modified_base 1: mod_base = OTHER; note = 2'-O-methylcytidine-3'-phosphate
  modified_base 2: mod_base = OTHER; note = 2'-O-methylcytidine-3'-phosphate
  modified_base 5: mod_base = OTHER; note = 2'-O-methylcytidine-3'-phosphate
  modified_base 6: mod_base = OTHER; note = 2'-O-methylcytidine-3'-phosphate
  modified_base 9: mod_base = OTHER; note = 2'-O-methylcytidine-3'-phosphate
  modified_base 10: mod_base = OTHER; note = 2'-O-methylcytidine-3'-phosphate
  modified_base 13: mod_base = OTHER; note = 2'-O-methylcytidine-3'-phosphate
  modified_base 14: mod_base = OTHER; note = 2'-O-methyluridine-3'-phosphate
  modified_base 15: mod_base = OTHER; note = 2'-O-methyluridine-3'-phosphate
  modified_base 17: mod_base = OTHER; note = 2'-O-methyluridine-3'-phosphate
  modified_base 18: mod_base = OTHER; note = 2'-O-methyluridine-3'-phosphate
  modified_base 19: mod_base = OTHER; note = 2'-O-methyluridine-3'-phosphate
  modified_base 20: mod_base = OTHER; note = deoxy-thymine phosphorothioate
  misc_feature 1..19: note = RNA
  misc_feature 20..21: note = DNA
ccaaccgaccagcttgttttt

SEQ ID NO: 322 - DNA, 21 bp, synthetic construct
  source 1..21: mol_type = other DNA; note = Description of Artificial Sequence: Synthetic oligonucleotide; note = Description of Combined DNA/RNA Molecule: Synthetic oligonucleotide
  modified_base 1: mod_base = OTHER; note = 2'-O-methylcytidine-3'-phosphate
  modified_base 2: mod_base = OTHER; note = 2'-O-methylcytidine-3'-phosphate
  modified_base 5: mod_base = OTHER; note = 2'-O-methylcytidine-3'-phosphate
  modified_base 6: mod_base = OTHER; note = 2'-O-methylcytidine-3'-phosphate
  modified_base 9: mod_base = OTHER; note = 2'-O-methylcytidine-3'-phosphate
  modified_base 10: mod_base = OTHER; note = 2'-O-methyluridine-3'-phosphate
  modified_base 11: mod_base = OTHER; note = 2'-O-methyluridine-3'-phosphate
  modified_base 13: mod_base = OTHER; note = 2'-O-methyluridine-3'-phosphate
  modified_base 14: mod_base = OTHER; note = 2'-O-methyluridine-3'-phosphate
  modified_base 15: mod_base = OTHER; note = 2'-O-methyluridine-3'-phosphate
  modified_base 17: mod_base = OTHER; note = 2'-O-methyluridine-3'-phosphate
  modified_base 20: mod_base = OTHER; note = deoxy-thymine phosphorothioate
  misc_feature 1..19: note = RNA
  misc_feature 20..21: note = DNA
ccgaccagcttgtttgtgatt

SEQ ID NO: 323 - DNA, 21 bp, synthetic construct
  source 1..21: mol_type = other DNA; note = Description of Artificial Sequence: Synthetic oligonucleotide; note = Description of Combined DNA/RNA Molecule: Synthetic oligonucleotide
  modified_base 1: mod_base = OTHER; note = 2'-O-methylcytidine-3'-phosphate
  modified_base 4: mod_base = OTHER; note = 2'-O-methylcytidine-3'-phosphate
  modified_base 5: mod_base = OTHER; note = 2'-O-methylcytidine-3'-phosphate
  modified_base 8: mod_base = OTHER; note = 2'-O-methylcytidine-3'-phosphate
  modified_base 9: mod_base = OTHER; note = 2'-O-methyluridine-3'-phosphate
  modified_base 10: mod_base = OTHER; note = 2'-O-methyluridine-3'-phosphate
  modified_base 12: mod_base = OTHER; note = 2'-O-methyluridine-3'-phosphate
  modified_base 13: mod_base = OTHER; note = 2'-O-methyluridine-3'-phosphate
  modified_base 14: mod_base = OTHER; note = 2'-O-methyluridine-3'-phosphate
  modified_base 16: mod_base = OTHER; note = 2'-O-methyluridine-3'-phosphate
  modified_base 20: mod_base = OTHER; note = deoxy-thymine phosphorothioate
  misc_feature 1..19: note = RNA
  misc_feature 20..21: note = DNA
cgaccagcttgtttgtgaatt

SEQ ID NO: 324 - DNA, 21 bp, synthetic construct
  source 1..21: mol_type = other DNA; note = Description of Artificial Sequence: Synthetic oligonucleotide; note = Description of Combined DNA/RNA Molecule: Synthetic oligonucleotide
  modified_base 3: mod_base = OTHER; note = 2'-O-methylcytidine-3'-phosphate
  modified_base 4: mod_base = OTHER; note = 2'-O-methylcytidine-3'-phosphate
  modified_base 7: mod_base = OTHER; note = 2'-O-methylcytidine-3'-phosphate
  modified_base 8: mod_base = OTHER; note = 2'-O-methyluridine-3'-phosphate
  modified_base 9: mod_base = OTHER; note = 2'-O-methyluridine-3'-phosphate
  modified_base 11: mod_base = OTHER; note = 2'-O-methyluridine-3'-phosphate
  modified_base 12: mod_base = OTHER; note = 2'-O-methyluridine-3'-phosphate
  modified_base 13: mod_base = OTHER; note = 2'-O-methyluridine-3'-phosphate
  modified_base 15: mod_base = OTHER; note = 2'-O-methyluridine-3'-phosphate
  modified_base 20: mod_base = OTHER; note = deoxy-thymine phosphorothioate
  misc_feature 1..19: note = RNA
  misc_feature 20..21: note = DNA
gaccagcttgtttgtgaaatt

SEQ ID NO: 325 - DNA, 21 bp, synthetic construct
  source 1..21: mol_type = other DNA; note = Description of Artificial Sequence: Synthetic oligonucleotide; note = Description of Combined DNA/RNA Molecule: Synthetic oligonucleotide
  modified_base 2: mod_base = OTHER; note = 2'-O-methylcytidine-3'-phosphate
  modified_base 3: mod_base = OTHER; note = 2'-O-methyluridine-3'-phosphate
  modified_base 4: mod_base = OTHER; note = 2'-O-methyluridine-3'-phosphate
  modified_base 6: mod_base = OTHER; note = 2'-O-methyluridine-3'-phosphate
  modified_base 7: mod_base = OTHER; note = 2'-O-methyluridine-3'-phosphate
  modified_base 8: mod_base = OTHER; note = 2'-O-methyluridine-3'-phosphate
  modified_base 10: mod_base = OTHER; note = 2'-O-methyluridine-3'-phosphate
  modified_base 15: mod_base = OTHER; note = 2'-O-methylcytidine-3'-phosphate
  modified_base 20: mod_base = OTHER; note = deoxy-thymine phosphorothioate
  misc_feature 1..19: note = RNA
  misc_feature 20..21: note = DNA
gcttgtttgtgaaacaaaatt

SEQ ID NO: 326 - DNA, 21 bp, synthetic construct
  source 1..21: mol_type = other DNA; note = Description of Artificial Sequence: Synthetic oligonucleotide; note = Description of Combined DNA/RNA Molecule: Synthetic oligonucleotide
  modified_base 1: mod_base = OTHER; note = 2'-O-methylcytidine-3'-phosphate
  modified_base 2: mod_base = OTHER; note = 2'-O-methyluridine-3'-phosphate
  modified_base 3: mod_base = OTHER; note = 2'-O-methyluridine-3'-phosphate
  modified_base 5: mod_base = OTHER; note = 2'-O-methyluridine-3'-phosphate
  modified_base 6: mod_base = OTHER; note = 2'-O-methyluridine-3'-phosphate
  modified_base 7: mod_base = OTHER; note = 2'-O-methyluridine-3'-phosphate
  modified_base 9: mod_base = OTHER; note = 2'-O-methyluridine-3'-phosphate
  modified_base 14: mod_base = OTHER; note = 2'-O-methylcytidine-3'-phosphate
  modified_base 20: mod_base = OTHER; note = deoxy-thymine phosphorothioate
  misc_feature 1..19: note = RNA
  misc_feature 20..21: note = DNA
cttgtttgtgaaacaaaaatt

SEQ ID NO: 327 - DNA, 21 bp, synthetic construct
  source 1..21: mol_type = other DNA; note = Description of Artificial Sequence: Synthetic oligonucleotide; note = Description of Combined DNA/RNA Molecule: Synthetic oligonucleotide
  modified_base 1: mod_base = OTHER; note = 2'-O-methyluridine-3'-phosphate
  modified_base 2: mod_base = OTHER; note = 2'-O-methyluridine-3'-phosphate
  modified_base 4: mod_base = OTHER; note = 2'-O-methyluridine-3'-phosphate
  modified_base 5: mod_base = OTHER; note = 2'-O-methyluridine-3'-phosphate
  modified_base 6: mod_base = OTHER; note = 2'-O-methyluridine-3'-phosphate
  modified_base 8: mod_base = OTHER; note = 2'-O-methyluridine-3'-phosphate
  modified_base 13: mod_base = OTHER; note = 2'-O-methylcytidine-3'-phosphate
  modified_base 20: mod_base = OTHER; note = deoxy-thymine phosphorothioate
  misc_feature 1..19: note = RNA
  misc_feature 20..21: note = DNA
ttgtttgtgaaacaaaaaatt

SEQ ID NO: 328 - DNA, 21 bp, synthetic construct
  source 1..21: mol_type = other DNA; note = Description of Artificial Sequence: Synthetic oligonucleotide; note = Description of Combined DNA/RNA Molecule: Synthetic oligonucleotide
  modified_base 2: mod_base = OTHER; note = 2'-O-methyluridine-3'-phosphate
  modified_base 3: mod_base = OTHER; note = 2'-O-methyluridine-3'-phosphate
  modified_base 4: mod_base = OTHER; note = 2'-O-methyluridine-3'-phosphate
  modified_base 6: mod_base = OTHER; note = 2'-O-methyluridine-3'-phosphate
  modified_base 11: mod_base = OTHER; note = 2'-O-methylcytidine-3'-phosphate
  modified_base 19: mod_base = OTHER; note = 2'-O-methyluridine-3'-phosphate
  modified_base 20: mod_base = OTHER; note = deoxy-thymine phosphorothioate
  misc_feature 1..19: note = RNA
  misc_feature 20..21: note = DNA
gtttgtgaaacaaaaaagttt

SEQ ID NO: 329 - DNA, 21 bp, synthetic construct
  source 1..21: mol_type = other DNA; note = Description of Artificial Sequence: Synthetic oligonucleotide; note = Description of Combined DNA/RNA Molecule: Synthetic oligonucleotide
  modified_base 1: mod_base = OTHER; note = 2'-O-methyluridine-3'-phosphate
  modified_base 2: mod_base = OTHER; note = 2'-O-methyluridine-3'-phosphate
  modified_base 4: mod_base = OTHER; note = 2'-O-methyluridine-3'-phosphate
  modified_base 9: mod_base = OTHER; note = 2'-O-methylcytidine-3'-phosphate
  modified_base 17: mod_base = OTHER; note = 2'-O-methyluridine-3'-phosphate
  modified_base 19: mod_base = OTHER; note = 2'-O-methyluridine-3'-phosphate
  modified_base 20: mod_base = OTHER; note = deoxy-thymine phosphorothioate
  misc_feature 1..19: note = RNA
  misc_feature 20..21: note = DNA
ttgtgaaacaaaaaagtgttt

SEQ ID NO: 330 - DNA, 21 bp, synthetic construct
  source 1..21: mol_type = other DNA; note = Description of Artificial Sequence: Synthetic oligonucleotide; note = Description of Combined DNA/RNA Molecule: Synthetic oligonucleotide
  modified_base 1: mod_base = OTHER; note = 2'-O-methyluridine-3'-phosphate
  modified_base 6: mod_base = OTHER; note = 2'-O-methylcytidine-3'-phosphate
  modified_base 14: mod_base = OTHER; note = 2'-O-methyluridine-3'-phosphate
  modified_base 16: mod_base = OTHER; note = 2'-O-methyluridine-3'-phosphate
  modified_base 17: mod_base = OTHER; note = 2'-O-methyluridine-3'-phosphate
  modified_base 18: mod_base = OTHER; note = 2'-O-methylcytidine-3'-phosphate
  modified_base 19: mod_base = OTHER; note = 2'-O-methylcytidine-3'-phosphate
  modified_base 20: mod_base = OTHER; note = deoxy-thymine phosphorothioate
  misc_feature 1..19: note = RNA
  misc_feature 20..21: note = DNA
tgaaacaaaaaagtgttcctt

SEQ ID NO: 331 - DNA, 21 bp, synthetic construct
  source 1..21: mol_type = other DNA; note = Description of Artificial Sequence: Synthetic oligonucleotide; note = Description of Combined DNA/RNA Molecule: Synthetic oligonucleotide
  modified_base 1: mod_base = OTHER; note = 2'-O-methylcytidine-3'-phosphate
  modified_base 9: mod_base = OTHER; note = 2'-O-methyluridine-3'-phosphate
  modified_base 11: mod_base = OTHER; note = 2'-O-methyluridine-3'-phosphate
  modified_base 12: mod_base = OTHER; note = 2'-O-methyluridine-3'-phosphate
  modified_base 13: mod_base = OTHER; note = 2'-O-methylcytidine-3'-phosphate
  modified_base 14: mod_base = OTHER; note = 2'-O-methylcytidine-3'-phosphate
  modified_base 15: mod_base = OTHER; note = 2'-O-methylcytidine-3'-phosphate
  modified_base 16: mod_base = OTHER; note = 2'-O-methyluridine-3'-phosphate
  modified_base 17: mod_base = OTHER; note = 2'-O-methyluridine-3'-phosphate
  modified_base 18: mod_base = OTHER; note = 2'-O-methyluridine-3'-phosphate
  modified_base 19: mod_base = OTHER; note = 2'-O-methyluridine-3'-phosphate
  modified_base 20: mod_base = OTHER; note = deoxy-thymine phosphorothioate
  misc_feature 1..19: note = RNA
  misc_feature 20..21: note = DNA
caaaaaagtgttccctttttt

SEQ ID NO: 332 - DNA, 21 bp, synthetic construct
  source 1..21: mol_type = other DNA; note = Description of Artificial Sequence: Synthetic oligonucleotide; note = Description of Combined DNA/RNA Molecule: Synthetic oligonucleotide
  modified_base 7: mod_base = OTHER; note = 2'-O-methyluridine-3'-phosphate
  modified_base 9: mod_base = OTHER; note = 2'-O-methyluridine-3'-phosphate
  modified_base 10: mod_base = OTHER; note = 2'-O-methyluridine-3'-phosphate
  modified_base 11: mod_base = OTHER; note = 2'-O-methylcytidine-3'-phosphate
  modified_base 12: mod_base = OTHER; note = 2'-O-methylcytidine-3'-phosphate
  modified_base 13: mod_base = OTHER; note = 2'-O-methylcytidine-3'-phosphate
  modified_base 14: mod_base = OTHER; note = 2'-O-methyluridine-3'-phosphate
  modified_base 15: mod_base = OTHER; note = 2'-O-methyluridine-3'-phosphate
  modified_base 16: mod_base = OTHER; note = 2'-O-methyluridine-3'-phosphate
  modified_base 17: mod_base = OTHER; note = 2'-O-methyluridine-3'-phosphate
  modified_base 18: mod_base = OTHER; note = 2'-O-methylcytidine-3'-phosphate
  modified_base 20: mod_base = OTHER; note = deoxy-thymine phosphorothioate
  misc_feature 1..19: note = RNA
  misc_feature 20..21: note = DNA
aaaaagtgttcccttttcatt

SEQ ID NO: 333 - DNA, 21 bp, synthetic construct
  source 1..21: mol_type = other DNA; note = Description of Artificial Sequence: Synthetic oligonucleotide; note = Description of Combined DNA/RNA Molecule: Synthetic oligonucleotide
  modified_base 6: mod_base = OTHER; note = 2'-O-methyluridine-3'-phosphate
  modified_base 8: mod_base = OTHER; note = 2'-O-methyluridine-3'-phosphate
  modified_base 9: mod_base = OTHER; note = 2'-O-methyluridine-3'-phosphate
  modified_base 10: mod_base = OTHER; note = 2'-O-methylcytidine-3'-phosphate
  modified_base 11: mod_base = OTHER; note = 2'-O-methylcytidine-3'-phosphate
  modified_base 12: mod_base = OTHER; note = 2'-O-methylcytidine-3'-phosphate
  modified_base 13: mod_base = OTHER; note = 2'-O-methyluridine-3'-phosphate
  modified_base 14: mod_base = OTHER; note = 2'-O-methyluridine-3'-phosphate
  modified_base 15: mod_base = OTHER; note = 2'-O-methyluridine-3'-phosphate
  modified_base 16: mod_base = OTHER; note = 2'-O-methyluridine-3'-phosphate
  modified_base 17: mod_base = OTHER; note = 2'-O-methylcytidine-3'-phosphate
  modified_base 20: mod_base = OTHER; note = deoxy-thymine phosphorothioate
  misc_feature 1..19: note = RNA
  misc_feature 20..21: note = DNA
aaaagtgttcccttttcaatt

SEQ ID NO: 334 - DNA, 21 bp, synthetic construct
  source 1..21: mol_type = other DNA; note = Description of Artificial Sequence: Synthetic oligonucleotide; note = Description of Combined DNA/RNA Molecule: Synthetic oligonucleotide
  modified_base 1: mod_base = OTHER; note = 2'-O-methyluridine-3'-phosphate
  modified_base 2: mod_base = OTHER; note = 2'-O-methyluridine-3'-phosphate
  modified_base 3: mod_base = OTHER; note = 2'-O-methylcytidine-3'-phosphate
  modified_base 4: mod_base = OTHER; note = 2'-O-methylcytidine-3'-phosphate
  modified_base 5: mod_base = OTHER; note = 2'-O-methylcytidine-3'-phosphate
  modified_base 6: mod_base = OTHER; note = 2'-O-methyluridine-3'-phosphate
  modified_base 7: mod_base = OTHER; note = 2'-O-methyluridine-3'-phosphate
  modified_base 8: mod_base = OTHER; note = 2'-O-methyluridine-3'-phosphate
  modified_base 9: mod_base = OTHER; note = 2'-O-methyluridine-3'-phosphate
  modified_base 10: mod_base = OTHER; note = 2'-O-methylcytidine-3'-phosphate
  modified_base 14: mod_base = OTHER; note = 2'-O-methyluridine-3'-phosphate
  modified_base 15: mod_base = OTHER; note = 2'-O-methyluridine-3'-phosphate
  modified_base 20: mod_base = OTHER; note = deoxy-thymine phosphorothioate
  misc_feature 1..19: note = RNA
  misc_feature 20..21: note = DNA
ttcccttttcaagttgagatt

SEQ ID NO: 335 - DNA, 21 bp, synthetic construct
  source 1..21: mol_type = other DNA; note = Description of Artificial Sequence: Synthetic oligonucleotide; note = Description of Combined DNA/RNA Molecule: Synthetic oligonucleotide
  modified_base 1: mod_base = OTHER; note = 2'-O-methylcytidine-3'-phosphate
  modified_base 2: mod_base = OTHER; note = 2'-O-methylcytidine-3'-phosphate
  modified_base 3: mod_base = OTHER; note = 2'-O-methyluridine-3'-phosphate
  modified_base 4: mod_base = OTHER; note = 2'-O-methyluridine-3'-phosphate
  modified_base 5: mod_base = OTHER; note = 2'-O-methyluridine-3'-phosphate
  modified_base 6: mod_base = OTHER; note = 2'-O-methyluridine-3'-phosphate
  modified_base 7: mod_base = OTHER; note = 2'-O-methylcytidine-3'-phosphate
  modified_base 11: mod_base = OTHER; note = 2'-O-methyluridine-3'-phosphate
  modified_base 12: mod_base = OTHER; note = 2'-O-methyluridine-3'-phosphate
  modified_base 18: mod_base = OTHER; note = 2'-O-methylcytidine-3'-phosphate
  modified_base 20: mod_base = OTHER; note = deoxy-thymine phosphorothioate
  misc_feature 1..19: note = RNA
  misc_feature 20..21: note = DNA
ccttttcaagttgagaacatt

SEQ ID NO: 336 - DNA, 21 bp, synthetic construct
  source 1..21: mol_type = other DNA; note = Description of Artificial Sequence: Synthetic oligonucleotide; note = Description of Combined DNA/RNA Molecule: Synthetic oligonucleotide
  modified_base 1: mod_base = OTHER; note = 2'-O-methyluridine-3'-phosphate
  modified_base 2: mod_base = OTHER; note = 2'-O-methyluridine-3'-phosphate
  modified_base 3: mod_base = OTHER; note = 2'-O-methyluridine-3'-phosphate
  modified_base 4: mod_base = OTHER; note = 2'-O-methylcytidine-3'-phosphate
  modified_base 8: mod_base = OTHER; note = 2'-O-methyluridine-3'-phosphate
  modified_base 9: mod_base = OTHER; note = 2'-O-methyluridine-3'-phosphate
  modified_base 15: mod_base = OTHER; note = 2'-O-methylcytidine-3'-phosphate
  modified_base 20: mod_base = OTHER; note = deoxy-thymine phosphorothioate
  misc_feature 1..19: note = RNA
  misc_feature 20..21: note = DNA
tttcaagttgagaacaaaatt

SEQ ID NO: 337 - DNA, 21 bp, synthetic construct
  source 1..21: mol_type = other DNA; note = Description of Artificial Sequence: Synthetic oligonucleotide; note = Description of Combined DNA/RNA Molecule: Synthetic oligonucleotide
  modified_base 1: mod_base = OTHER; note = 2'-O-methyluridine-3'-phosphate
  modified_base 2: mod_base = OTHER; note = 2'-O-methyluridine-3'-phosphate
  modified_base 3: mod_base = OTHER; note = 2'-O-methylcytidine-3'-phosphate
  modified_base 7: mod_base = OTHER; note = 2'-O-methyluridine-3'-phosphate
  modified_base 8: mod_base = OTHER; note = 2'-O-methyluridine-3'-phosphate
  modified_base 14: mod_base = OTHER; note = 2'-O-methylcytidine-3'-phosphate
  modified_base 20: mod_base = OTHER; note = deoxy-thymine phosphorothioate
  misc_feature 1..19: note = RNA
  misc_feature 20..21: note = DNA
ttcaagttgagaacaaaaatt

SEQ ID NO: 338 - DNA, 21 bp, synthetic construct
  source 1..21: mol_type = other DNA; note = Description of Artificial Sequence: Synthetic oligonucleotide; note = Description of Combined DNA/RNA Molecule: Synthetic oligonucleotide
  modified_base 1: mod_base = OTHER; note = 2'-O-methylcytidine-3'-phosphate
  modified_base 5: mod_base = OTHER; note = 2'-O-methyluridine-3'-phosphate
  modified_base 6: mod_base = OTHER; note = 2'-O-methyluridine-3'-phosphate
  modified_base 12: mod_base = OTHER; note = 2'-O-methylcytidine-3'-phosphate
  modified_base 18: mod_base = OTHER; note = 2'-O-methyluridine-3'-phosphate
  modified_base 19: mod_base = OTHER; note = 2'-O-methyluridine-3'-phosphate
  modified_base 20: mod_base = OTHER; note = deoxy-thymine phosphorothioate
  misc_feature 1..19: note = RNA
  misc_feature 20..21: note = DNA
caagttgagaacaaaaatttt

SEQ ID NO: 339 - DNA, 21 bp, synthetic construct
  source 1..21: mol_type = other DNA; note = Description of Artificial Sequence: Synthetic oligonucleotide; note = Description of Combined DNA/RNA Molecule: Synthetic oligonucleotide
  modified_base 3: mod_base = OTHER; note = 2'-O-methyluridine-3'-phosphate
  modified_base 4: mod_base = OTHER; note = 2'-O-methyluridine-3'-phosphate
  modified_base 10: mod_base = OTHER; note = 2'-O-methylcytidine-3'-phosphate
  modified_base 16: mod_base = OTHER; note = 2'-O-methyluridine-3'-phosphate
  modified_base 17: mod_base = OTHER; note = 2'-O-methyluridine-3'-phosphate
  modified_base 20: mod_base = OTHER; note = deoxy-thymine phosphorothioate
  misc_feature 1..19: note = RNA
  misc_feature 20..21: note = DNA
agttgagaacaaaaattggtt

SEQ ID NO: 340 - DNA, 21 bp, synthetic construct
  source 1..21: mol_type = other DNA; note = Description of Artificial Sequence: Synthetic oligonucleotide; note = Description of Combined DNA/RNA Molecule: Synthetic oligonucleotide
  modified_base 2: mod_base = OTHER; note = 2'-O-methyluridine-3'-phosphate
  modified_base 3: mod_base = OTHER; note = 2'-O-methyluridine-3'-phosphate
  modified_base 9: mod_base = OTHER; note = 2'-O-methylcytidine-3'-phosphate
  modified_base 15: mod_base = OTHER; note = 2'-O-methyluridine-3'-phosphate
  modified_base 16: mod_base = OTHER; note = 2'-O-methyluridine-3'-phosphate
  modified_base 20: mod_base = OTHER; note = deoxy-thymine phosphorothioate
  misc_feature 1..19: note = RNA
  misc_feature 20..21: note = DNA
gttgagaacaaaaattgggtt

SEQ ID NO: 341 - DNA, 21 bp, synthetic construct
  source 1..21: mol_type = other DNA; note = Description of Artificial Sequence: Synthetic oligonucleotide; note = Description of Combined DNA/RNA Molecule: Synthetic oligonucleotide
  modified_base 1: mod_base = OTHER; note = 2'-O-methyluridine-3'-phosphate
  modified_base 7: mod_base = OTHER; note = 2'-O-methylcytidine-3'-phosphate
  modified_base 13: mod_base = OTHER; note = 2'-O-methyluridine-3'-phosphate
  modified_base 14: mod_base = OTHER; note = 2'-O-methyluridine-3'-phosphate
  modified_base 18: mod_base = OTHER; note = 2'-O-methyluridine-3'-phosphate
  modified_base 19: mod_base = OTHER; note = 2'-O-methyluridine-3'-phosphate
  modified_base 20: mod_base = OTHER; note = deoxy-thymine phosphorothioate
  misc_feature 1..19: note = RNA
  misc_feature 20..21: note = DNA
tgagaacaaaaattgggtttt

SEQ ID NO: 342 - DNA, 21 bp, synthetic construct
  source 1..21: mol_type = other DNA; note = Description of Artificial Sequence: Synthetic oligonucleotide; note = Description of Combined DNA/RNA Molecule: Synthetic oligonucleotide
  modified_base 6: mod_base = OTHER; note = 2'-O-methylcytidine-3'-phosphate
  modified_base 12: mod_base = OTHER; note = 2'-O-methyluridine-3'-phosphate
  modified_base 13: mod_base = OTHER; note = 2'-O-methyluridine-3'-phosphate
  modified_base 17: mod_base = OTHER; note = 2'-O-methyluridine-3'-phosphate
  modified_base 18: mod_base = OTHER; note = 2'-O-methyluridine-3'-phosphate
  modified_base 19: mod_base = OTHER; note = 2'-O-methyluridine-3'-phosphate
  modified_base 20: mod_base = OTHER; note = deoxy-thymine phosphorothioate
  misc_feature 1..19: note = RNA
  misc_feature 20..21: note = DNA
gagaacaaaaattgggttttt

SEQ ID NO: 343 - DNA, 21 bp, synthetic construct
  source 1..21: mol_type = other DNA; note = Description of Artificial Sequence: Synthetic oligonucleotide; note = Description of Combined DNA/RNA Molecule: Synthetic oligonucleotide
  modified_base 4: mod_base = OTHER; note = 2'-O-methylcytidine-3'-phosphate
  modified_base 10: mod_base = OTHER; note = 2'-O-methyluridine-3'-phosphate
  modified_base 11: mod_base = OTHER; note = 2'-O-methyluridine-3'-phosphate
  modified_base 15: mod_base = OTHER; note = 2'-O-methyluridine-3'-phosphate
  modified_base 16: mod_base = OTHER; note = 2'-O-methyluridine-3'-phosphate
  modified_base 17: mod_base = OTHER; note = 2'-O-methyluridine-3'-phosphate
  modified_base 18: mod_base = OTHER; note = 2'-O-methyluridine-3'-phosphate
  modified_base 20: mod_base = OTHER; note = deoxy-thymine phosphorothioate
  misc_feature 1..19: note = RNA
  misc_feature 20..21: note = DNA
gaacaaaaattgggttttatt

SEQ ID NO: 344 - DNA, 21 bp, synthetic construct
  source 1..21: mol_type = other DNA; note = Description of Artificial Sequence: Synthetic oligonucleotide; note = Description of Combined DNA/RNA Molecule: Synthetic oligonucleotide
  modified_base 3: mod_base = OTHER; note = 2'-O-methylcytidine-3'-phosphate
  modified_base 9: mod_base = OTHER; note = 2'-O-methyluridine-3'-phosphate
  modified_base 10: mod_base = OTHER; note = 2'-O-methyluridine-3'-phosphate
  modified_base 14: mod_base = OTHER; note = 2'-O-methyluridine-3'-phosphate
  modified_base 15: mod_base = OTHER; note = 2'-O-methyluridine-3'-phosphate
  modified_base 16: mod_base = OTHER; note = 2'-O-methyluridine-3'-phosphate
  modified_base 17: mod_base = OTHER; note = 2'-O-methyluridine-3'-phosphate
  modified_base 20: mod_base = OTHER; note = deoxy-thymine phosphorothioate
  misc_feature 1..19: note = RNA
  misc_feature 20..21: note = DNA
aacaaaaattgggttttaatt

SEQ ID NO: 345 - DNA, 21 bp, synthetic construct
  source 1..21: mol_type = other DNA; note = Description of Artificial Sequence: Synthetic oligonucleotide; note = Description of Combined DNA/RNA Molecule: Synthetic oligonucleotide
  modified_base 2: mod_base = OTHER; note = 2'-O-methylcytidine-3'-phosphate
  modified_base 8: mod_base = OTHER; note = 2'-O-methyluridine-3'-phosphate
  modified_base 9: mod_base = OTHER; note = 2'-O-methyluridine-3'-phosphate
  modified_base 13: mod_base = OTHER; note = 2'-O-methyluridine-3'-phosphate
  modified_base 14: mod_base = OTHER; note = 2'-O-methyluridine-3'-phosphate
  modified_base 15: mod_base = OTHER; note = 2'-O-methyluridine-3'-phosphate
  modified_base 16: mod_base = OTHER; note = 2'-O-methyluridine-3'-phosphate
  modified_base 20: mod_base = OTHER; note = deoxy-thymine phosphorothioate
  misc_feature 1..19: note = RNA
  misc_feature 20..21: note = DNA
acaaaaattgggttttaaatt

SEQ ID NO: 346 - DNA, 21 bp, synthetic construct
  source 1..21: mol_type = other DNA; note = Description of Artificial Sequence: Synthetic oligonucleotide; note = Description of Combined DNA/RNA Molecule: Synthetic oligonucleotide
  modified_base 1: mod_base = OTHER; note = 2'-O-methylcytidine-3'-phosphate
  modified_base 7: mod_base = OTHER; note = 2'-O-methyluridine-3'-phosphate
  modified_base 8: mod_base = OTHER; note = 2'-O-methyluridine-3'-phosphate
  modified_base 12: mod_base = OTHER; note = 2'-O-methyluridine-3'-phosphate
  modified_base 13: mod_base = OTHER; note = 2'-O-methyluridine-3'-phosphate
  modified_base 14: mod_base = OTHER; note = 2'-O-methyluridine-3'-phosphate
  modified_base 15: mod_base = OTHER; note = 2'-O-methyluridine-3'-phosphate
  modified_base 20: mod_base = OTHER; note = deoxy-thymine phosphorothioate
  misc_feature 1..19: note = RNA
  misc_feature 20..21: note = DNA
caaaaattgggttttaaaatt

SEQ ID NO: 347 - DNA, 21 bp, synthetic construct
  source 1..21: mol_type = other DNA; note = Description of Artificial Sequence: Synthetic oligonucleotide; note = Description of Combined DNA/RNA Molecule: Synthetic oligonucleotide
  modified_base 2: mod_base = OTHER; note = 2'-O-methyluridine-3'-phosphate
  modified_base 3: mod_base = OTHER; note = 2'-O-methyluridine-3'-phosphate
  modified_base 7: mod_base = OTHER; note = 2'-O-methyluridine-3'-phosphate
  modified_base 8: mod_base = OTHER; note = 2'-O-methyluridine-3'-phosphate
  modified_base 9: mod_base = OTHER; note = 2'-O-methyluridine-3'-phosphate
  modified_base 10: mod_base = OTHER; note = 2'-O-methyluridine-3'-phosphate
  modified_base 15: mod_base = OTHER; note = 2'-O-methyluridine-3'-phosphate
  modified_base 16: mod_base = OTHER; note = 2'-O-methyluridine-3'-phosphate
  modified_base 20: mod_base = OTHER; note = deoxy-thymine phosphorothioate
  misc_feature 1..19: note = RNA
  misc_feature 20..21: note = DNA
attgggttttaaaattaaatt

SEQ ID NO: 348 - DNA, 21 bp, synthetic construct
  source 1..21: mol_type = other DNA; note = Description of Artificial Sequence: Synthetic oligonucleotide; note = Description of Combined DNA/RNA Molecule: Synthetic oligonucleotide
  modified_base 1: mod_base = OTHER; note = 2'-O-methyluridine-3'-phosphate
  modified_base 2: mod_base = OTHER; note = 2'-O-methyluridine-3'-phosphate
  modified_base 6: mod_base = OTHER; note = 2'-O-methyluridine-3'-phosphate
  modified_base 7: mod_base = OTHER; note = 2'-O-methyluridine-3'-phosphate
  modified_base 8: mod_base = OTHER; note = 2'-O-methyluridine-3'-phosphate
  modified_base 9: mod_base = OTHER; note = 2'-O-methyluridine-3'-phosphate
  modified_base 14: mod_base = OTHER; note = 2'-O-methyluridine-3'-phosphate
  modified_base 15: mod_base = OTHER; note = 2'-O-methyluridine-3'-phosphate
  modified_base 20: mod_base = OTHER; note = deoxy-thymine phosphorothioate
  misc_feature 1..19: note = RNA
  misc_feature 20..21: note = DNA
ttgggttttaaaattaaagtt

SEQ ID NO: 349 - DNA, 21 bp, synthetic construct
  source 1..21: mol_type = other DNA; note = Description of Artificial Sequence: Synthetic oligonucleotide; note = Description of Combined DNA/RNA Molecule: Synthetic oligonucleotide
  modified_base 1: mod_base = OTHER; note = 2'-O-methyluridine-3'-phosphate
  modified_base 5: mod_base = OTHER; note = 2'-O-methyluridine-3'-phosphate
  modified_base 6: mod_base = OTHER; note = 2'-O-methyluridine-3'-phosphate
  modified_base 7: mod_base = OTHER; note = 2'-O-methyluridine-3'-phosphate
  modified_base 8: mod_base = OTHER; note = 2'-O-methyluridine-3'-phosphate
  modified_base 13: mod_base = OTHER; note = 2'-O-methyluridine-3'-phosphate
  modified_base 14: mod_base = OTHER; note = 2'-O-methyluridine-3'-phosphate
  modified_base 19: mod_base = OTHER; note = 2'-O-methyluridine-3'-phosphate
  modified_base 20: mod_base = OTHER; note = deoxy-thymine phosphorothioate
  misc_feature 1..19: note = RNA
  misc_feature 20..21: note = DNA
tgggttttaaaattaaagttt

SEQ ID NO: 350 - DNA, 21 bp, synthetic construct
  source 1..21: mol_type = other DNA; note = Description of Artificial Sequence: Synthetic oligonucleotide; note = Description of Combined DNA/RNA Molecule: Synthetic oligonucleotide
  modified_base 1: mod_base = OTHER; note = 2'-O-methyluridine-3'-phosphate
  modified_base 2: mod_base = OTHER; note = 2'-O-methyluridine-3'-phosphate
  modified_base 3: mod_base = OTHER; note = 2'-O-methyluridine-3'-phosphate
  modified_base 8: mod_base = OTHER; note = 2'-O-methyluridine-3'-phosphate
  modified_base 9: mod_base = OTHER; note = 2'-O-methyluridine-3'-phosphate
  modified_base 14: mod_base = OTHER; note = 2'-O-methyluridine-3'-phosphate
  modified_base 16: mod_base = OTHER; note = 2'-O-methyluridine-3'-phosphate
  modified_base 18: mod_base = OTHER; note = 2'-O-methylcytidine-3'-phosphate
  modified_base 20: mod_base = OTHER; note = deoxy-thymine phosphorothioate
  misc_feature 1..19: note = RNA
  misc_feature 20..21: note = DNA
tttaaaattaaagtatacatt

SEQ ID NO: 351 - DNA, 21 bp, synthetic construct
  source 1..21: mol_type = other DNA; note = Description of Artificial Sequence: Synthetic oligonucleotide; note = Description of Combined DNA/RNA Molecule: Synthetic oligonucleotide
  modified_base 1: mod_base = OTHER; note = 2'-O-methyluridine-3'-phosphate
  modified_base 2: mod_base = OTHER; note = 2'-O-methyluridine-3'-phosphate
  modified_base 7: mod_base = OTHER; note = 2'-O-methyluridine-3'-phosphate
  modified_base 8: mod_base = OTHER; note = 2'-O-methyluridine-3'-phosphate
  modified_base 13: mod_base = OTHER; note = 2'-O-methyluridine-3'-phosphate
  modified_base 15: mod_base = OTHER; note = 2'-O-methyluridine-3'-phosphate
  modified_base 17: mod_base = OTHER; note = 2'-O-methylcytidine-3'-phosphate
  modified_base 19: mod_base = OTHER; note = 2'-O-methyluridine-3'-phosphate
  modified_base 20: mod_base = OTHER; note = deoxy-thymine phosphorothioate
  misc_feature 1..19: note = RNA
  misc_feature 20..21: note = DNA
ttaaaattaaagtatacattt

SEQ ID NO: 352 - DNA, 21 bp, synthetic construct
  source 1..21: mol_type = other DNA; note = Description of Artificial Sequence: Synthetic oligonucleotide; note = Description of Combined DNA/RNA Molecule: Synthetic oligonucleotide
  modified_base 1: mod_base = OTHER; note = 2'-O-methyluridine-3'-phosphate
  modified_base 2: mod_base = OTHER; note = 2'-O-methyluridine-3'-phosphate
  modified_base 4: mod_base = OTHER; note = 2'-O-methyluridine-3'-phosphate
  modified_base 6: mod_base = OTHER; note = 2'-O-methyluridine-3'-phosphate
  modified_base 7: mod_base = OTHER; note = 2'-O-methyluridine-3'-phosphate
  modified_base 8: mod_base = OTHER; note = 2'-O-methyluridine-3'-phosphate
  modified_base 11: mod_base = OTHER; note = 2'-O-methyluridine-3'-phosphate
  modified_base 13: mod_base = OTHER; note = 2'-O-methyluridine-3'-phosphate
  modified_base 14: mod_base = OTHER; note = 2'-O-methylcytidine-3'-phosphate
  modified_base 15: mod_base = OTHER; note = 2'-O-methyluridine-3'-phosphate
  modified_base 16: mod_base = OTHER; note = 2'-O-methyluridine-3'-phosphate
  modified_base 20: mod_base = OTHER; note = deoxy-thymine phosphorothioate
  misc_feature 1..19: note = RNA
  misc_feature 20..21: note = DNA
ttgtatttagtgtcttgaatt

SEQ ID NO: 353 - DNA, 21 bp, synthetic construct
  source 1..21: mol_type = other DNA; note = Description of Artificial Sequence: Synthetic oligonucleotide; note = Description of Combined DNA/RNA Molecule: Synthetic oligonucleotide
  modified_base 1: mod_base = OTHER; note = 2'-O-methyluridine-3'-phosphate
  modified_base 3: mod_base = OTHER; note = 2'-O-methyluridine-3'-phosphate
  modified_base 5: mod_base = OTHER; note = 2'-O-methyluridine-3'-phosphate
  modified_base 6: mod_base = OTHER; note = 2'-O-methyluridine-3'-phosphate
  modified_base 7: mod_base = OTHER; note = 2'-O-methyluridine-3'-phosphate
  modified_base 10: mod_base = OTHER; note = 2'-O-methyluridine-3'-phosphate
  modified_base 12: mod_base = OTHER; note = 2'-O-methyluridine-3'-phosphate
  modified_base 13: mod_base = OTHER; note = 2'-O-methylcytidine-3'-phosphate
  modified_base 14: mod_base = OTHER; note = 2'-O-methyluridine-3'-phosphate
  modified_base 15: mod_base = OTHER; note = 2'-O-methyluridine-3'-phosphate
  modified_base 19: mod_base = OTHER; note = 2'-O-methyluridine-3'-phosphate
  modified_base 20: mod_base = OTHER; note = deoxy-thymine phosphorothioate
  misc_feature 1..19: note = RNA
  misc_feature 20..21: note = DNA
tgtatttagtgtcttgaattt

SEQ ID NO: 354 - DNA, 21 bp, synthetic construct
  source 1..21: mol_type = other DNA; note = Description of Artificial Sequence: Synthetic oligonucleotide; note = Description of Combined DNA/RNA Molecule: Synthetic oligonucleotide
  modified_base 1: mod_base = OTHER; note = 2'-O-methyluridine-3'-phosphate
  modified_base 4: mod_base = OTHER; note = 2'-O-methyluridine-3'-phosphate
  modified_base 6: mod_base = OTHER; note = 2'-O-methyluridine-3'-phosphate
  modified_base 7: mod_base = OTHER; note = 2'-O-methylcytidine-3'-phosphate
  modified_base 8: mod_base = OTHER; note = 2'-O-methyluridine-3'-phosphate
  modified_base 9: mod_base = OTHER; note = 2'-O-methyluridine-3'-phosphate
  modified_base 13: mod_base = OTHER; note = 2'-O-methyluridine-3'-phosphate
  modified_base 15: mod_base = OTHER; note = 2'-O-methyluridine-3'-phosphate
  modified_base 20: mod_base = OTHER; note = deoxy-thymine phosphorothioate
  misc_feature 1..19: note = RNA
  misc_feature 20..21: note = DNA
tagtgtcttgaatgtaagatt

SEQ ID NO: 355 - DNA, 21 bp, synthetic construct
  source 1..21: mol_type = other DNA; note = Description of Artificial Sequence: Synthetic oligonucleotide; note = Description of Combined DNA/RNA Molecule: Synthetic oligonucleotide
  modified_base 1: mod_base = OTHER; note = 2'-O-methylcytidine-3'-phosphate
  modified_base 2: mod_base = OTHER; note = 2'-O-methyluridine-3'-phosphate
  modified_base 3: mod_base = OTHER; note = 2'-O-methyluridine-3'-phosphate
  modified_base 7: mod_base = OTHER; note = 2'-O-methyluridine-3'-phosphate
  modified_base 9: mod_base = OTHER; note = 2'-O-methyluridine-3'-phosphate
  modified_base 15: mod_base = OTHER; note = 2'-O-methylcytidine-3'-phosphate
  modified_base 17: mod_base = OTHER; note = 2'-O-methyluridine-3'-phosphate
  modified_base 20: mod_base = OTHER; note = deoxy-thymine phosphorothioate
  misc_feature 1..19: note = RNA
  misc_feature 20..21: note = DNA
cttgaatgtaagaacatgatt

SEQ ID NO: 356 - DNA, 21 bp, synthetic construct
  source 1..21: mol_type = other DNA; note = Description of Artificial Sequence: Synthetic oligonucleotide; note = Description of Combined DNA/RNA Molecule: Synthetic oligonucleotide
  modified_base 1: mod_base = OTHER; note = 2'-O-methyluridine-3'-phosphate
  modified_base 2: mod_base = OTHER; note = 2'-O-methyluridine-3'-phosphate
  modified_base 6: mod_base = OTHER; note = 2'-O-methyluridine-3'-phosphate
  modified_base 8: mod_base = OTHER; note = 2'-O-methyluridine-3'-phosphate
  modified_base 14: mod_base = OTHER; note = 2'-O-methylcytidine-3'-phosphate
  modified_base 16: mod_base = OTHER; note = 2'-O-methyluridine-3'-phosphate
  modified_base 19: mod_base = OTHER; note = 2'-O-methylcytidine-3'-phosphate
  modified_base 20: mod_base = OTHER; note = deoxy-thymine phosphorothioate
  misc_feature 1..19: note = RNA
  misc_feature 20..21: note = DNA
ttgaatgtaagaacatgactt

SEQ ID NO: 357 - DNA, 21 bp, synthetic construct
  source 1..21: mol_type = other DNA; note = Description of Artificial Sequence: Synthetic oligonucleotide; note = Description of Combined DNA/RNA Molecule: Synthetic oligonucleotide
  modified_base 1: mod_base = OTHER; note = 2'-O-methylcytidine-3'-phosphate
  modified_base 2: mod_base = OTHER; note = 2'-O-methyluridine-3'-phosphate
  modified_base 3: mod_base = OTHER; note = 2'-O-methyluridine-3'-phosphate
  modified_base 6: mod_base = OTHER; note = 2'-O-methyluridine-3'-phosphate
  modified_base 7: mod_base = OTHER; note = 2'-O-methyluridine-3'-phosphate
  modified_base 8: mod_base = OTHER; note = 2'-O-methyluridine-3'-phosphate
  modified_base 9: mod_base = OTHER; note = 2'-O-methyluridine-3'-phosphate
  modified_base 10: mod_base = OTHER; note = 2'-O-methyluridine-3'-phosphate
  modified_base 11: mod_base = OTHER; note = 2'-O-methyluridine-3'-phosphate
  modified_base 12: mod_base = OTHER; note = 2'-O-methylcytidine-3'-phosphate
  modified_base 13: mod_base = OTHER; note = 2'-O-methylcytidine-3'-phosphate
  modified_base 15: mod_base = OTHER; note = 2'-O-methylcytidine-3'-phosphate
  modified_base 19: mod_base = OTHER; note = 2'-O-methyluridine-3'-phosphate
  modified_base 20: mod_base = OTHER; note = deoxy-thymine phosphorothioate
  misc_feature 1..19: note = RNA
  misc_feature 20..21: note = DNA
cttagttttttccacagattt

SEQ ID NO: 358 - DNA, 21 bp, synthetic construct
  source 1..21: mol_type = other DNA; note = Description of Artificial Sequence: Synthetic oligonucleotide; note = Description of Combined DNA/RNA Molecule: Synthetic oligonucleotide
  modified_base 1: mod_base = OTHER; note = 2'-O-methylcytidine-3'-phosphate
  modified_base 2: mod_base = OTHER; note = 2'-O-methylcytidine-3'-phosphate
  modified_base 4: mod_base = OTHER; note = 2'-O-methylcytidine-3'-phosphate
  modified_base 8: mod_base = OTHER; note = 2'-O-methyluridine-3'-phosphate
  modified_base 10: mod_base = OTHER; note = 2'-O-methylcytidine-3'-phosphate
  modified_base 11: mod_base = OTHER; note = 2'-O-methyluridine-3'-phosphate
  modified_base 12: mod_base = OTHER; note = 2'-O-methyluridine-3'-phosphate
  modified_base 14: mod_base = OTHER; note = 2'-O-methyluridine-3'-phosphate
  modified_base 17: mod_base = OTHER; note = 2'-O-methyluridine-3'-phosphate
  modified_base 18: mod_base = OTHER; note = 2'-O-methyluridine-3'-phosphate
  modified_base 19: mod_base = OTHER; note = 2'-O-methyluridine-3'-phosphate
  modified_base 20: mod_base = OTHER; note = deoxy-thymine phosphorothioate
  misc_feature 1..19: note = RNA
  misc_feature 20..21: note = DNA
ccacagatgcttgtgattttt

SEQ ID NO: 359 - DNA, 21 bp, synthetic construct
  source 1..21: mol_type = other DNA; note = Description of Artificial Sequence: Synthetic oligonucleotide; note = Description of Combined DNA/RNA Molecule: Synthetic oligonucleotide
  modified_base 2: mod_base = OTHER; note = 2'-O-methylcytidine-3'-phosphate
  modified_base 6: mod_base = OTHER; note = 2'-O-methyluridine-3'-phosphate
  modified_base 8: mod_base = OTHER; note = 2'-O-methylcytidine-3'-phosphate
  modified_base 9: mod_base = OTHER; note = 2'-O-methyluridine-3'-phosphate
  modified_base 10: mod_base = OTHER; note = 2'-O-methyluridine-3'-phosphate
  modified_base 12: mod_base = OTHER; note = 2'-O-methyluridine-3'-phosphate
  modified_base 15: mod_base = OTHER; note = 2'-O-methyluridine-3'-phosphate
  modified_base 16: mod_base = OTHER; note = 2'-O-methyluridine-3'-phosphate
  modified_base 17: mod_base = OTHER; note = 2'-O-methyluridine-3'-phosphate
  modified_base 18: mod_base = OTHER; note = 2'-O-methyluridine-3'-phosphate
  modified_base 19: mod_base = OTHER; note = 2'-O-methyluridine-3'-phosphate
  modified_base 20: mod_base = OTHER; note = deoxy-thymine phosphorothioate
  misc_feature 1..19: note = RNA
  misc_feature 20..21: note = DNA
acagatgcttgtgattttttt

SEQ ID NO: 360 - DNA, 21 bp, synthetic construct
  source 1..21: mol_type = other DNA; note = Description of Artificial Sequence: Synthetic oligonucleotide; note = Description of Combined DNA/RNA Molecule: Synthetic oligonucleotide
  modified_base 1: mod_base = OTHER; note = 2'-O-methylcytidine-3'-phosphate
  modified_base 2: mod_base = OTHER; note = 2'-O-methyluridine-3'-phosphate
  modified_base 6: mod_base = OTHER; note = 2'-O-methyluridine-3'-phosphate
  modified_base 7: mod_base = OTHER; note = 2'-O-methyluridine-3'-phosphate
  modified_base 8: mod_base = OTHER; note = 2'-O-methyluridine-3'-phosphate
  modified_base 9: mod_base = OTHER; note = 2'-O-methylcytidine-3'-phosphate
  modified_base 10: mod_base = OTHER; note = 2'-O-methyluridine-3'-phosphate
  modified_base 12: mod_base = OTHER; note = 2'-O-methyluridine-3'-phosphate
  modified_base 13: mod_base = OTHER; note = 2'-O-methyluridine-3'-phosphate
  modified_base 14: mod_base = OTHER; note = 2'-O-methyluridine-3'-phosphate
  modified_base 18: mod_base = OTHER; note = 2'-O-methyluridine-3'-phosphate
  modified_base 20: mod_base = OTHER; note = deoxy-thymine phosphorothioate
  misc_feature 1..19: note = RNA
  misc_feature 20..21: note = DNA
ctgaatttctgtttgaatgtt

SEQ ID NO: 361 - DNA, 21 bp, synthetic construct
  source 1..21: mol_type = other DNA; note = Description of Artificial Sequence: Synthetic oligonucleotide; note = Description of Combined DNA/RNA Molecule: Synthetic oligonucleotide
  modified_base 3: mod_base = OTHER; note = 2'-O-methylcytidine-3'-phosphate
  modified_base 4: mod_base = OTHER; note = 2'-O-methylcytidine-3'-phosphate
  modified_base 6: mod_base = OTHER; note = 2'-O-methyluridine-3'-phosphate
  modified_base 9: mod_base = OTHER; note = 2'-O-methylcytidine-3'-phosphate
  modified_base 10: mod_base = OTHER; note = 2'-O-methyluridine-3'-phosphate
  modified_base 13: mod_base = OTHER; note = 2'-O-methyluridine-3'-phosphate
  modified_base 14: mod_base = OTHER; note = 2'-O-methyluridine-3'-phosphate
  modified_base 16: mod_base = OTHER; note = 2'-O-methyluridine-3'-phosphate
  modified_base 17: mod_base = OTHER; note = 2'-O-methyluridine-3'-phosphate
  modified_base 18: mod_base = OTHER; note = 2'-O-methyluridine-3'-phosphate
  modified_base 19: mod_base = OTHER; note = 2'-O-methylcytidine-3'-phosphate
  modified_base 20: mod_base = OTHER; note = deoxy-thymine phosphorothioate
  misc_feature 1..19: note = RNA
  misc_feature 20..21: note = DNA
aaccatagctggttatttctt

SEQ ID NO: 362 - DNA, 21 bp, synthetic construct
  source 1..21: mol_type = other DNA; note = Description of Artificial Sequence: Synthetic oligonucleotide; note = Description of Combined DNA/RNA Molecule: Synthetic oligonucleotide
  modified_base 1: mod_base = OTHER; note = 2'-O-methylcytidine-3'-phosphate
  modified_base 2: mod_base = OTHER; note = 2'-O-methylcytidine-3'-phosphate
  modified_base 4: mod_base = OTHER; note = 2'-O-methyluridine-3'-phosphate
  modified_base 7: mod_base = OTHER; note = 2'-O-methylcytidine-3'-phosphate
  modified_base 8: mod_base = OTHER; note = 2'-O-methyluridine-3'-phosphate
  modified_base 11: mod_base = OTHER; note = 2'-O-methyluridine-3'-phosphate
  modified_base 12: mod_base = OTHER; note = 2'-O-methyluridine-3'-phosphate
  modified_base 14: mod_base = OTHER; note = 2'-O-methyluridine-3'-phosphate
  modified_base 15: mod_base = OTHER; note = 2'-O-methyluridine-3'-phosphate
  modified_base 16: mod_base = OTHER; note = 2'-O-methyluridine-3'-phosphate
  modified_base 17: mod_base = OTHER; note = 2'-O-methylcytidine-3'-phosphate
  modified_base 18: mod_base = OTHER; note = 2'-O-methyluridine-3'-phosphate
  modified_base 19: mod_base = OTHER; note = 2'-O-methylcytidine-3'-phosphate
  modified_base 20: mod_base = OTHER; note = deoxy-thymine phosphorothioate
  misc_feature 1..19: note = RNA
  misc_feature 20..21: note = DNA
ccatagctggttatttctctt

SEQ ID NO: 363 - DNA, 21 bp, synthetic construct
  source 1..21: mol_type = other DNA; note = Description of Artificial Sequence: Synthetic oligonucleotide; note = Description of Combined DNA/RNA Molecule: Synthetic oligonucleotide
  modified_base 8: mod_base = OTHER; note = 2'-O-methyluridine-3'-phosphate
  modified_base 11: mod_base = OTHER; note = 2'-O-methyluridine-3'-phosphate
  modified_base 15: mod_base = OTHER; note = 2'-O-methylcytidine-3'-phosphate
  modified_base 20: mod_base = OTHER; note = deoxy-thymine phosphorothioate
  misc_feature 1..19: note = RNA
  misc_feature 20..21: note = DNA
tctgctgtagtacccagaatt

SEQ ID NO: 364 - DNA, 21 bp, synthetic construct
  source 1..21: mol_type = other DNA; note = Description of Artificial Sequence: Synthetic oligonucleotide; note = Description of Combined DNA/RNA Molecule: Synthetic oligonucleotide
  modified_base 1: mod_base = OTHER; note = 2'-O-methyluridine-3'-phosphate
  modified_base 14: mod_base = OTHER; note = 2'-O-methyluridine-3'-phosphate
  modified_base 17: mod_base = OTHER; note = 2'-O-methyluridine-3'-phosphate
  modified_base 20: mod_base = OTHER; note = deoxy-thymine phosphorothioate
  misc_feature 1..19: note = RNA
  misc_feature 20..21: note = DNA
tacccttctgctgtagtactt

SEQ ID NO: 365 - DNA, 21 bp, synthetic construct
  source 1..21: mol_type = other DNA; note = Description of Artificial Sequence: Synthetic oligonucleotide; note = Description of Combined DNA/RNA Molecule: Synthetic oligonucleotide
  modified_base 3: mod_base = OTHER; note = 2'-O-methyluridine-3'-phosphate
  modified_base 7: mod_base = OTHER; note = 2'-O-methyluridine-3'-phosphate
  modified_base 9: mod_base = OTHER; note = 2'-O-methylcytidine-3'-phosphate
  modified_base 17: mod_base = OTHER; note = 2'-O-methylcytidine-3'-phosphate
  modified_base 20: mod_base = OTHER; note = deoxy-thymine phosphorothioate
  misc_feature 1..19: note = RNA
  misc_feature 20..21: note = DNA
tgtatgtacacccggtcactt

SEQ ID NO: 366 - DNA, 21 bp, synthetic construct
  source 1..21: mol_type = other DNA; note = Description of Artificial Sequence: Synthetic oligonucleotide; note = Description of Combined DNA/RNA Molecule: Synthetic oligonucleotide
  modified_base 4: mod_base = OTHER; note = 2'-O-methylcytidine-3'-phosphate
  modified_base 20: mod_base = OTHER; note = deoxy-thymine phosphorothioate
  misc_feature 1..19: note = RNA
  misc_feature 20..21: note = DNA
tctcattgtggatgacgagtt

SEQ ID NO: 367 - DNA, 21 bp, synthetic construct
  source 1..21: mol_type = other DNA; note = Description of Artificial Sequence: Synthetic oligonucleotide; note = Description of Combined DNA/RNA Molecule: Synthetic oligonucleotide
  modified_base 2: mod_base = OTHER; note = 2'-O-methylcytidine-3'-phosphate
  modified_base 6: mod_base = OTHER; note = 2'-O-methyluridine-3'-phosphate
  modified_base 12: mod_base = OTHER; note = 2'-O-methylcytidine-3'-phosphate
  modified_base 20: mod_base = OTHER; note = deoxy-thymine phosphorothioate
  misc_feature 1..19: note = RNA
  misc_feature 20..21: note = DNA
acaggtactctcattgtggtt

SEQ ID NO: 368 - DNA, 21 bp, synthetic construct
  source 1..21: mol_type = other DNA; note = Description of Artificial Sequence: Synthetic oligonucleotide; note = Description of Combined DNA/RNA Molecule: Synthetic oligonucleotide
  modified_base 1: mod_base = OTHER; note = 2'-O-methylcytidine-3'-phosphate
  modified_base 3: mod_base = OTHER; note = 2'-O-methylcytidine-3'-phosphate
  modified_base 7: mod_base = OTHER; note = 2'-O-methyluridine-3'-phosphate
  modified_base 13: mod_base = OTHER; note = 2'-O-methylcytidine-3'-phosphate
  modified_base 20: mod_base = OTHER; note = deoxy-thymine phosphorothioate
  misc_feature 1..19: note = RNA
  misc_feature 20..21: note = DNA
cacaggtactctcattgtgtt

SEQ ID NO: 369 - DNA, 21 bp, synthetic construct
  source 1..21: mol_type = other DNA; note = Description of Artificial Sequence: Synthetic oligonucleotide; note = Description of Combined DNA/RNA Molecule: Synthetic oligonucleotide
  modified_base 7: mod_base = OTHER; note = 2'-O-methylcytidine-3'-phosphate
  modified_base 15: mod_base = OTHER; note = 2'-O-methylcytidine-3'-phosphate
  modified_base 17: mod_base = OTHER; note = 2'-O-methylcytidine-3'-phosphate
  modified_base 20: mod_base = OTHER; note = deoxy-thymine phosphorothioate
  misc_feature 1..19: note = RNA
  misc_feature 20..21: note = DNA
ctttgccagctgctcacagtt

SEQ ID NO: 370 - DNA, 21 bp, synthetic construct
  source 1..21: mol_type = other DNA; note = Description of Artificial Sequence: Synthetic oligonucleotide; note = Description of Combined DNA/RNA Molecule: Synthetic oligonucleotide
  modified_base 11: mod_base = OTHER; note = 2'-O-methylcytidine-3'-phosphate
  modified_base 15: mod_base = OTHER; note = 2'-O-methylcytidine-3'-phosphate
  modified_base 17: mod_base = OTHER; note = 2'-O-methylcytidine-3'-phosphate
  modified_base 20: mod_base = OTHER; note = deoxy-thymine phosphorothioate
  misc_feature 1..19: note = RNA
  misc_feature 20..21: note = DNA
agggccttttcatccacagtt

SEQ ID NO: 371 - DNA, 21 bp, synthetic construct
  source 1..21: mol_type = other DNA; note = Description of Artificial Sequence: Synthetic oligonucleotide; note = Description of Combined DNA/RNA Molecule: Synthetic oligonucleotide
  modified_base 6: mod_base = OTHER; note = 2'-O-methylcytidine-3'-phosphate
  modified_base 9: mod_base = OTHER; note = 2'-O-methylcytidine-3'-phosphate
  modified_base 18: mod_base = OTHER; note = 2'-O-methylcytidine-3'-phosphate
  modified_base 20: mod_base = OTHER; note = deoxy-thymine phosphorothioate
  misc_feature 1..19: note = RNA
  misc_feature 20..21: note = DNA
ttggccagcatcccgaccatt

SEQ ID NO: 372 - DNA, 21 bp, synthetic construct
  source 1..21: mol_type = other DNA; note = Description of Artificial Sequence: Synthetic oligonucleotide; note = Description of Combined DNA/RNA Molecule: Synthetic oligonucleotide
  modified_base 9: mod_base = OTHER; note = 2'-O-methylcytidine-3'-phosphate
  modified_base 12: mod_base = OTHER; note = 2'-O-methylcytidine-3'-phosphate
  modified_base 20: mod_base = OTHER; note = deoxy-thymine phosphorothioate
  misc_feature 1..19: note = RNA
  misc_feature 20..21: note = DNA
aagttggccagcatcccgatt

SEQ ID NO: 373 - DNA, 21 bp, synthetic construct
  source 1..21: mol_type = other DNA; note = Description of Artificial Sequence: Synthetic oligonucleotide; note = Description of Combined DNA/RNA Molecule: Synthetic oligonucleotide
  modified_base 12: mod_base = OTHER; note = 2'-O-methylcytidine-3'-phosphate
  modified_base 15: mod_base = OTHER; note = 2'-O-methylcytidine-3'-phosphate
  modified_base 20: mod_base = OTHER; note = deoxy-thymine phosphorothioate
  misc_feature 1..19: note = RNA
  misc_feature 20..21: note = DNA
aagaagttggccagcatcctt

SEQ ID NO: 374 - DNA, 21 bp, synthetic construct
  source 1..21: mol_type = other DNA; note = Description of Artificial Sequence: Synthetic oligonucleotide; note = Description of Combined DNA/RNA Molecule: Synthetic oligonucleotide
  modified_base 6: mod_base = OTHER; note = 2'-O-methylcytidine-3'-phosphate
  modified_base 18: mod_base = OTHER; note = 2'-O-methylcytidine-3'-phosphate
  modified_base 20: mod_base = OTHER; note = deoxy-thymine phosphorothioate
  misc_feature 1..19: note = RNA
  misc_feature 20..21: note = DNA
aagcccaagaagttggccatt

SEQ ID NO: 375 - DNA, 21 bp, synthetic construct
  source 1..21: mol_type = other DNA; note = Description of Artificial Sequence: Synthetic oligonucleotide; note = Description of Combined DNA/RNA Molecule: Synthetic oligonucleotide
  modified_base 1: mod_base = OTHER; note = 2'-O-methyluridine-3'-phosphate
  modified_base 3: mod_base = OTHER; note = 2'-O-methyluridine-3'-phosphate
  modified_base 13: mod_base = OTHER; note = 2'-O-methylcytidine-3'-phosphate
  modified_base 20: mod_base = OTHER; note = deoxy-thymine phosphorothioate
  misc_feature 1..19: note = RNA
  misc_feature 20..21: note = DNA
tatacggaagcccaagaagtt

SEQ ID NO: 376 - DNA, 21 bp, synthetic construct
  source 1..21: mol_type = other DNA; note = Description of Artificial Sequence: Synthetic oligonucleotide; note = Description of Combined DNA/RNA Molecule: Synthetic oligonucleotide
  modified_base 2: mod_base = OTHER; note = 2'-O-methyluridine-3'-phosphate
  modified_base 4: mod_base = OTHER; note = 2'-O-methyluridine-3'-phosphate
  modified_base 6: mod_base = OTHER; note = 2'-O-methyluridine-3'-phosphate
  modified_base 16: mod_base = OTHER; note = 2'-O-methylcytidine-3'-phosphate
  modified_base 20: mod_base = OTHER; note = deoxy-thymine phosphorothioate
  misc_feature 1..19: note = RNA
  misc_feature 20..21: note = DNA
atatatacggaagcccaagtt

SEQ ID NO: 377 - DNA, 21 bp, synthetic construct
  source 1..21: mol_type = other DNA; note = Description of Artificial Sequence: Synthetic oligonucleotide; note = Description of Combined DNA/RNA Molecule: Synthetic oligonucleotide
  modified_base 5: mod_base = OTHER; note = 2'-O-methylcytidine-3'-phosphate
  modified_base 7: mod_base = OTHER; note = 2'-O-methyluridine-3'-phosphate
  modified_base 9: mod_base = OTHER; note = 2'-O-methyluridine-3'-phosphate
  modified_base 11: mod_base = OTHER; note = 2'-O-methyluridine-3'-phosphate
  modified_base 20: mod_base = OTHER; note = deoxy-thymine phosphorothioate
  misc_feature 1..19: note = RNA
  misc_feature 20..21: note = DNA
atgccatatatacggaagctt

SEQ ID NO: 378 - DNA, 21 bp, synthetic construct
  source 1..21: mol_type = other DNA; note = Description of Artificial Sequence: Synthetic oligonucleotide; note = Description of Combined DNA/RNA Molecule: Synthetic oligonucleotide
  modified_base 6: mod_base = OTHER; note = 2'-O-methylcytidine-3'-phosphate
  modified_base 11: mod_base = OTHER; note = 2'-O-methylcytidine-3'-phosphate
  modified_base 13: mod_base = OTHER; note = 2'-O-methyluridine-3'-phosphate
  modified_base 15: mod_base = OTHER; note = 2'-O-methyluridine-3'-phosphate
  modified_base 17: mod_base = OTHER; note = 2'-O-methyluridine-3'-phosphate
  modified_base 20: mod_base = OTHER; note = deoxy-thymine phosphorothioate
  misc_feature 1..19: note = RNA
  misc_feature 20..21: note = DNA
ctgtgcatgccatatatactt

SEQ ID NO: 379 - DNA, 21 bp, synthetic construct
  source 1..21: mol_type = other DNA; note = Description of Artificial Sequence: Synthetic oligonucleotide; note = Description of Combined DNA/RNA Molecule: Synthetic oligonucleotide
  modified_base 2: mod_base = OTHER; note = 2'-O-methyluridine-3'-phosphate
  modified_base 7: mod_base = OTHER; note = 2'-O-methylcytidine-3'-phosphate
  modified_base 14: mod_base = OTHER; note = 2'-O-methylcytidine-3'-phosphate
  modified_base 20: mod_base = OTHER; note = deoxy-thymine phosphorothioate
  misc_feature 1..19: note = RNA
  misc_feature 20..21: note = DNA
atagctcactgtgcatgcctt

SEQ ID NO: 380 - DNA, 21 bp, synthetic construct
  source 1..21: mol_type = other DNA; note = Description of Artificial Sequence: Synthetic oligonucleotide; note = Description of Combined DNA/RNA Molecule: Synthetic oligonucleotide
  modified_base 1: mod_base = OTHER; note = 2'-O-methylcytidine-3'-phosphate
  modified_base 8: mod_base = OTHER; note = 2'-O-methylcytidine-3'-phosphate
  modified_base 15: mod_base = OTHER; note = 2'-O-methylcytidine-3'-phosphate
  modified_base 17: mod_base = OTHER; note = 2'-O-methyluridine-3'-phosphate
  modified_base 20: mod_base = OTHER; note = deoxy-thymine phosphorothioate
  misc_feature 1..19: note = RNA
  misc_feature 20..21: note = DNA
catggaccacgccccatagtt

SEQ ID NO: 381 - DNA, 21 bp, synthetic construct
  source 1..21: mol_type = other DNA; note = Description of Artificial Sequence: Synthetic oligonucleotide; note = Description of Combined DNA/RNA Molecule: Synthetic oligonucleotide
  modified_base 6: mod_base = OTHER; note = 2'-O-methylcytidine-3'-phosphate
  modified_base 20: mod_base = OTHER; note = deoxy-thymine phosphorothioate
  misc_feature 1..19: note = RNA
  misc_feature 20..21: note = DNA
aaagacagccgttggggagtt

SEQ ID NO: 382 - DNA, 21 bp, synthetic construct
  source 1..21: mol_type = other DNA; note = Description of Artificial Sequence: Synthetic oligonucleotide; note = Description of Combined DNA/RNA Molecule: Synthetic oligonucleotide
  modified_base 1: mod_base = OTHER; note = 2'-O-methylcytidine-3'-phosphate
  modified_base 7: mod_base = OTHER; note = 2'-O-methylcytidine-3'-phosphate
  modified_base 20: mod_base = OTHER; note = deoxy-thymine phosphorothioate
  misc_feature 1..19: note = RNA
  misc_feature 20..21: note = DNA
caaagacagccgttggggatt

SEQ ID NO: 383 - DNA, 21 bp, synthetic construct
  source 1..21: mol_type = other DNA; note = Description of Artificial Sequence: Synthetic oligonucleotide; note = Description of Combined DNA/RNA Molecule: Synthetic oligonucleotide
  modified_base 1: mod_base = OTHER; note = 2'-O-methylcytidine-3'-phosphate
  modified_base 16: mod_base = OTHER; note = 2'-O-methylcytidine-3'-phosphate
  modified_base 20: mod_base = OTHER; note = deoxy-thymine phosphorothioate
  misc_feature 1..19: note = RNA
  misc_feature 20..21: note = DNA
cagttcttgtccttccaagtt

SEQ ID NO: 384 - DNA, 21 bp, synthetic construct
  source 1..21: mol_type = other DNA; note = Description of Artificial Sequence: Synthetic oligonucleotide; note = Description of Combined DNA/RNA Molecule: Synthetic oligonucleotide
  modified_base 8: mod_base = OTHER; note = 2'-O-methylcytidine-3'-phosphate
  modified_base 20: mod_base = OTHER; note = deoxy-thymine phosphorothioate
  misc_feature 1..19: note = RNA
  misc_feature 20..21: note = DNA
tgaagtccagagagcgtggtt

SEQ ID NO: 385 - DNA, 21 bp, synthetic construct
  source 1..21: mol_type = other DNA; note = Description of Artificial Sequence: Synthetic oligonucleotide; note = Description of Combined DNA/RNA Molecule: Synthetic oligonucleotide
  modified_base 4: mod_base = OTHER; note = 2'-O-methylcytidine-3'-phosphate
  modified_base 13: mod_base = OTHER; note = 2'-O-methylcytidine-3'-phosphate
  modified_base 16: mod_base = OTHER; note = 2'-O-methylcytidine-3'-phosphate
  modified_base 20: mod_base = OTHER; note = deoxy-thymine phosphorothioate
  misc_feature 1..19: note = RNA
  misc_feature 20..21: note = DNA
tgtcaatcttctcagcagctt

SEQ ID NO: 386 - DNA, 21 bp, synthetic construct
  source 1..21: mol_type = other DNA; note = Description of Artificial Sequence: Synthetic oligonucleotide; note = Description of Combined DNA/RNA Molecule: Synthetic oligonucleotide
  modified_base 5: mod_base = OTHER; note = 2'-O-methylcytidine-3'-phosphate
  modified_base 14: mod_base = OTHER; note = 2'-O-methylcytidine-3'-phosphate
  modified_base 17: mod_base = OTHER; note = 2'-O-methylcytidine-3'-phosphate
  modified_base 20: mod_base = OTHER; note = deoxy-thymine phosphorothioate
  misc_feature 1..19: note = RNA
  misc_feature 20..21: note = DNA
ctgtcaatcttctcagcagtt

SEQ ID NO: 387 - DNA, 21 bp, synthetic construct
  source 1..21: mol_type = other DNA; note = Description of Artificial Sequence: Synthetic oligonucleotide; note = Description of Combined DNA/RNA Molecule: Synthetic oligonucleotide
  modified_base 6: mod_base = OTHER; note = 2'-O-methylcytidine-3'-phosphate
  modified_base 15: mod_base = OTHER; note = 2'-O-methylcytidine-3'-phosphate
  modified_base 18: mod_base = OTHER; note = 2'-O-methylcytidine-3'-phosphate
  modified_base 20: mod_base = OTHER; note = deoxy-thymine phosphorothioate
  misc_feature 1..19: note = RNA
  misc_feature 20..21: note = DNA
cctgtcaatcttctcagcatt

SEQ ID NO: 388 - DNA, 21 bp, synthetic construct
  source 1..21: mol_type = other DNA; note = Description of Artificial Sequence: Synthetic oligonucleotide; note = Description of Combined DNA/RNA Molecule: Synthetic oligonucleotide
  modified_base 7: mod_base = OTHER; note = 2'-O-methylcytidine-3'-phosphate
  modified_base 16: mod_base = OTHER; note = 2'-O-methylcytidine-3'-phosphate
  modified_base 20: mod_base = OTHER; note = deoxy-thymine phosphorothioate
  misc_feature 1..19: note = RNA
  misc_feature 20..21: note = DNA
acctgtcaatcttctcagctt

SEQ ID NO: 389 - DNA, 21 bp, synthetic construct
  source 1..21: mol_type = other DNA; note = Description of Artificial Sequence: Synthetic oligonucleotide; note = Description of Combined DNA/RNA Molecule: Synthetic oligonucleotide
  modified_base 8: mod_base = OTHER; note = 2'-O-methylcytidine-3'-phosphate
  modified_base 17: mod_base = OTHER; note = 2'-O-methylcytidine-3'-phosphate
  modified_base 20: mod_base = OTHER; note = deoxy-thymine phosphorothioate
  misc_feature 1..19: note = RNA
  misc_feature 20..21: note = DNA
aacctgtcaatcttctcagtt

SEQ ID NO: 390 - DNA, 21 bp, synthetic construct
  source 1..21: mol_type = other DNA; note = Description of Artificial Sequence: Synthetic oligonucleotide; note = Description of Combined DNA/RNA Molecule: Synthetic oligonucleotide
  modified_base 6: mod_base = OTHER; note = 2'-O-methylcytidine-3'-phosphate
  modified_base 17: mod_base = OTHER; note = 2'-O-methylcytidine-3'-phosphate
  modified_base 20: mod_base = OTHER; note = deoxy-thymine phosphorothioate
  misc_feature 1..19: note = RNA
  misc_feature 20..21: note = DNA
gcctgcatgaacctgtcaatt

SEQ ID NO: 391 - DNA, 21 bp, synthetic construct
  source 1..21: mol_type = other DNA; note = Description of Artificial Sequence: Synthetic oligonucleotide; note = Description of Combined DNA/RNA Molecule: Synthetic oligonucleotide
  modified_base 6: mod_base = OTHER; note = 2'-O-methylcytidine-3'-phosphate
  modified_base 14: mod_base = OTHER; note = 2'-O-methylcytidine-3'-phosphate
  modified_base 16: mod_base = OTHER; note = 2'-O-methylcytidine-3'-phosphate
  modified_base 20: mod_base = OTHER; note = deoxy-thymine phosphorothioate
  misc_feature 1..19: note = RNA
  misc_feature 20..21: note = DNA
tcttccatcctgtcacagctt

SEQ ID NO: 392 - DNA, 21 bp, synthetic construct
  source 1..21: mol_type = other DNA; note = Description of Artificial Sequence: Synthetic oligonucleotide; note = Description of Combined DNA/RNA Molecule: Synthetic oligonucleotide
  modified_base 8: mod_base = OTHER; note = 2'-O-methylcytidine-3'-phosphate
  modified_base 12: mod_base = OTHER; note = 2'-O-methylcytidine-3'-phosphate
  modified_base 20: mod_base = OTHER; note = deoxy-thymine phosphorothioate
  misc_feature 1..19: note = RNA
  misc_feature 20..21: note = DNA
tgttgtccacccagaactctt

SEQ ID NO: 393 - DNA, 21 bp, synthetic construct
  source 1..21: mol_type = other DNA; note = Description of Artificial Sequence: Synthetic oligonucleotide; note = Description of Combined DNA/RNA Molecule: Synthetic oligonucleotide
  modified_base 13: mod_base = OTHER; note = 2'-O-methylcytidine-3'-phosphate
  modified_base 17: mod_base = OTHER; note = 2'-O-methylcytidine-3'-phosphate
  modified_base 20: mod_base = OTHER; note = deoxy-thymine phosphorothioate
  misc_feature 1..19: note = RNA
  misc_feature 20..21: note = DNA
ggtgctgttgtccacccagtt

SEQ ID NO: 394 - DNA, 21 bp, synthetic construct
  source 1..21: mol_type = other DNA; note = Description of Artificial Sequence: Synthetic oligonucleotide; note = Description of Combined DNA/RNA Molecule: Synthetic oligonucleotide
  modified_base 18: mod_base = OTHER; note = 2'-O-methylcytidine-3'-phosphate
  modified_base 20: mod_base = OTHER; note = deoxy-thymine phosphorothioate
  misc_feature 1..19: note = RNA
  misc_feature 20..21: note = DNA
actgaggtgctgttgtccatt

SEQ ID NO: 395 - DNA, 21 bp, synthetic construct
  source 1..21: mol_type = other DNA; note = Description of Artificial Sequence: Synthetic oligonucleotide; note = Description of Combined DNA/RNA Molecule: Synthetic oligonucleotide
  modified_base 4: mod_base = OTHER; note = 2'-O-methylcytidine-3'-phosphate
  modified_base 20: mod_base = OTHER; note = deoxy-thymine phosphorothioate
  misc_feature 1..19: note = RNA
  misc_feature 20..21: note = DNA
agacactgaggtgctgttgtt

SEQ ID NO: 396 - DNA, 21 bp, synthetic construct
  source 1..21: mol_type = other DNA; note = Description of Artificial Sequence: Synthetic oligonucleotide; note = Description of Combined DNA/RNA Molecule: Synthetic oligonucleotide
  modified_base 9: mod_base = OTHER; note = 2'-O-methylcytidine-3'-phosphate
  modified_base 18: mod_base = OTHER; note = 2'-O-methylcytidine-3'-phosphate
  modified_base 20: mod_base = OTHER; note = deoxy-thymine phosphorothioate
  misc_feature 1..19: note = RNA
  misc_feature 20..21: note = DNA
agaccctccaccttgtccatt

SEQ ID NO: 397 - DNA, 21 bp, synthetic construct
  source 1..21: mol_type = other DNA; note = Description of Artificial Sequence: Synthetic oligonucleotide; note = Description of Combined DNA/RNA Molecule: Synthetic oligonucleotide
  modified_base 13: mod_base = OTHER; note = 2'-O-methylcytidine-3'-phosphate
  modified_base 20: mod_base = OTHER; note = deoxy-thymine phosphorothioate
  misc_feature 1..19: note = RNA
  misc_feature 20..21: note = DNA
agtgagaccctccaccttgtt

SEQ ID NO: 398 - DNA, 21 bp, synthetic construct
  source 1..21: mol_type = other DNA; note = Description of Artificial Sequence: Synthetic oligonucleotide; note = Description of Combined DNA/RNA Molecule: Synthetic oligonucleotide
  modified_base 15: mod_base = OTHER; note = 2'-O-methylcytidine-3'-phosphate
  modified_base 20: mod_base = OTHER; note = deoxy-thymine phosphorothioate
  misc_feature 1..19: note = RNA
  misc_feature 20..21: note = DNA
aaagtgagaccctccaccttt

SEQ ID NO: 399 - DNA, 21 bp, synthetic construct
  source 1..21: mol_type = other DNA; note = Description of Artificial Sequence: Synthetic oligonucleotide; note = Description of Combined DNA/RNA Molecule: Synthetic oligonucleotide
  modified_base 20: mod_base = OTHER; note = deoxy-thymine phosphorothioate
  misc_feature 1..19: note = RNA
  misc_feature 20..21: note = DNA
agggagttttgctggaaagtt

SEQ ID NO: 400 - DNA, 21 bp, synthetic construct
  source 1..21: mol_type = other DNA; note = Description of Artificial Sequence: Synthetic oligonucleotide; note = Description of Combined DNA/RNA Molecule: Synthetic oligonucleotide
  modified_base 20: mod_base = OTHER; note = deoxy-thymine phosphorothioate
  misc_feature 1..19: note = RNA
  misc_feature 20..21: note = DNA
gttgagggagttttgctggtt

SEQ ID NO: 401 - DNA, 21 bp, synthetic construct
  source 1..21: mol_type = other DNA; note = Description of Artificial Sequence: Synthetic oligonucleotide; note = Description of Combined DNA/RNA Molecule: Synthetic oligonucleotide
  modified_base 20: mod_base = OTHER; note = deoxy-thymine phosphorothioate
  misc_feature 1..19: note = RNA
  misc_feature 20..21: note = DNA
agttgagggagttttgctgtt

SEQ ID NO: 402 - DNA, 21 bp, synthetic construct
  source 1..21: mol_type = other DNA; note = Description of Artificial Sequence: Synthetic oligonucleotide; note = Description of Combined DNA/RNA Molecule: Synthetic oligonucleotide
  modified_base 3: mod_base = OTHER; note = 2'-O-methylcytidine-3'-phosphate
  modified_base 20: mod_base = OTHER; note = deoxy-thymine phosphorothioate
  misc_feature 1..19: note = RNA
  misc_feature 20..21: note = DNA
tccagttgagggagttttgtt

SEQ ID NO: 403 - DNA, 21 bp, synthetic construct
  source 1..21: mol_type = other DNA; note = Description of Artificial Sequence: Synthetic oligonucleotide; note = Description of Combined DNA/RNA Molecule: Synthetic oligonucleotide
  modified_base 5: mod_base = OTHER; note = 2'-O-methylcytidine-3'-phosphate
  modified_base 9: mod_base = OTHER; note = 2'-O-methylcytidine-3'-phosphate
  modified_base 20: mod_base = OTHER; note = deoxy-thymine phosphorothioate
  misc_feature 1..19: note = RNA
  misc_feature 20..21: note = DNA
tcttcatccagttgagggatt

SEQ ID NO: 404 - DNA, 21 bp, synthetic construct
  source 1..21: mol_type = other DNA; note = Description of Artificial Sequence: Synthetic oligonucleotide; note = Description of Combined DNA/RNA Molecule: Synthetic oligonucleotide
  modified_base 6: mod_base = OTHER; note = 2'-O-methylcytidine-3'-phosphate
  modified_base 10: mod_base = OTHER; note = 2'-O-methylcytidine-3'-phosphate
  modified_base 20: mod_base = OTHER; note = deoxy-thymine phosphorothioate
  misc_feature 1..19: note = RNA
  misc_feature 20..21: note = DNA
ttcttcatccagttgagggtt

SEQ ID NO: 405 - DNA, 21 bp, synthetic construct
  source 1..21: mol_type = other DNA; note = Description of Artificial Sequence: Synthetic oligonucleotide; note = Description of Combined DNA/RNA Molecule: Synthetic oligonucleotide
  modified_base 9: mod_base = OTHER; note = 2'-O-methylcytidine-3'-phosphate
  modified_base 13: mod_base = OTHER; note = 2'-O-methylcytidine-3'-phosphate
  modified_base 20: mod_base = OTHER; note = deoxy-thymine phosphorothioate
  misc_feature 1..19: note = RNA
  misc_feature 20..21: note = DNA
agtttcttcatccagttgatt

SEQ ID NO: 406 - DNA, 21 bp, synthetic construct
  source 1..21: mol_type = other DNA; note = Description of Artificial Sequence: Synthetic oligonucleotide; note = Description of Combined DNA/RNA Molecule: Synthetic oligonucleotide
  modified_base 6: mod_base = OTHER; note = 2'-O-methylcytidine-3'-phosphate
  modified_base 12: mod_base = OTHER; note = 2'-O-methylcytidine-3'-phosphate
  modified_base 20: mod_base = OTHER; note = deoxy-thymine phosphorothioate
  misc_feature 1..19: note = RNA
  misc_feature 20..21: note = DNA
ttttgcaggttcagctcggtt

SEQ ID NO: 407 - DNA, 21 bp, synthetic construct
  source 1..21: mol_type = other DNA; note = Description of Artificial Sequence: Synthetic oligonucleotide; note = Description of Combined DNA/RNA Molecule: Synthetic oligonucleotide
  modified_base 7: mod_base = OTHER; note = 2'-O-methylcytidine-3'-phosphate
  modified_base 13: mod_base = OTHER; note = 2'-O-methylcytidine-3'-phosphate
  modified_base 20: mod_base = OTHER; note = deoxy-thymine phosphorothioate
  misc_feature 1..19: note = RNA
  misc_feature 20..21: note = DNA
tttttgcaggttcagctcgtt

SEQ ID NO: 408 - DNA, 21 bp, synthetic construct
  source 1..21: mol_type = other DNA; note = Description of Artificial Sequence: Synthetic oligonucleotide; note = Description of Combined DNA/RNA Molecule: Synthetic oligonucleotide
  modified_base 4: mod_base = OTHER; note = 2'-O-methylcytidine-3'-phosphate
  modified_base 13: mod_base = OTHER; note = 2'-O-methylcytidine-3'-phosphate
  modified_base 20: mod_base = OTHER; note = deoxy-thymine phosphorothioate
  misc_feature 1..19: note = RNA
  misc_feature 20..21: note = DNA
gctcaatttttgcaggttctt

SEQ ID NO: 409 - DNA, 21 bp, synthetic construct
  source 1..21: mol_type = other DNA; note = Description of Artificial Sequence: Synthetic oligonucleotide; note = Description of Combined DNA/RNA Molecule: Synthetic oligonucleotide
  modified_base 6: mod_base = OTHER; note = 2'-O-methylcytidine-3'-phosphate
  modified_base 15: mod_base = OTHER; note = 2'-O-methylcytidine-3'-phosphate
  modified_base 20: mod_base = OTHER; note = deoxy-thymine phosphorothioate
  misc_feature 1..19: note = RNA
  misc_feature 20..21: note = DNA
ttgctcaatttttgcaggttt

SEQ ID NO: 410 - DNA, 21 bp, synthetic construct
  source 1..21: mol_type = other DNA; note = Description of Artificial Sequence: Synthetic oligonucleotide; note = Description of Combined DNA/RNA Molecule: Synthetic oligonucleotide
  modified_base 7: mod_base = OTHER; note = 2'-O-methylcytidine-3'-phosphate
  modified_base 16: mod_base = OTHER; note = 2'-O-methylcytidine-3'-phosphate
  modified_base 20: mod_base = OTHER; note = deoxy-thymine phosphorothioate
  misc_feature 1..19: note = RNA
  misc_feature 20..21: note = DNA
attgctcaatttttgcaggtt

SEQ ID NO: 411 - DNA, 21 bp, synthetic construct
  source 1..21: mol_type = other DNA; note = Description of Artificial Sequence: Synthetic oligonucleotide; note = Description of Combined DNA/RNA Molecule: Synthetic oligonucleotide
  modified_base 1: mod_base = OTHER; note = 2'-O-methylcytidine-3'-phosphate
  modified_base 8: mod_base = OTHER; note = 2'-O-methylcytidine-3'-phosphate
  modified_base 17: mod_base = OTHER; note = 2'-O-methylcytidine-3'-phosphate
  modified_base 20: mod_base = OTHER; note = deoxy-thymine phosphorothioate
  misc_feature 1..19: note = RNA
  misc_feature 20..21: note = DNA
cattgctcaatttttgcagtt

SEQ ID NO: 412 - DNA, 21 bp, synthetic construct
  source 1..21: mol_type = other DNA; note = Description of Artificial Sequence: Synthetic oligonucleotide; note = Description of Combined DNA/RNA Molecule: Synthetic oligonucleotide
  modified_base 2: mod_base = OTHER; note = 2'-O-methylcytidine-3'-phosphate
  modified_base 9: mod_base = OTHER; note = 2'-O-methylcytidine-3'-phosphate
  modified_base 18: mod_base = OTHER; note = 2'-O-methylcytidine-3'-phosphate
  modified_base 20: mod_base = OTHER; note = deoxy-thymine phosphorothioate
  misc_feature 1..19: note = RNA
  misc_feature 20..21: note = DNA
tcattgctcaatttttgcatt

SEQ ID NO: 413 - DNA, 21 bp, synthetic construct
  source 1..21: mol_type = other DNA; note = Description of Artificial Sequence: Synthetic oligonucleotide; note = Description of Combined DNA/RNA Molecule: Synthetic oligonucleotide
  modified_base 3: mod_base = OTHER; note = 2'-O-methylcytidine-3'-phosphate
  modified_base 10: mod_base = OTHER; note = 2'-O-methylcytidine-3'-phosphate
  modified_base 20: mod_base = OTHER; note = deoxy-thymine phosphorothioate
  misc_feature 1..19: note = RNA
  misc_feature 20..21: note = DNA
gtcattgctcaatttttgctt

SEQ ID NO: 414 - DNA, 21 bp, synthetic construct
  source 1..21: mol_type = other DNA; note = Description of Artificial Sequence: Synthetic oligonucleotide; note = Description of Combined DNA/RNA Molecule: Synthetic oligonucleotide
  modified_base 3: mod_base = OTHER; note = 2'-O-methylcytidine-3'-phosphate
  modified_base 6: mod_base = OTHER; note = 2'-O-methylcytidine-3'-phosphate
  modified_base 15: mod_base = OTHER; note = 2'-O-methylcytidine-3'-phosphate
  modified_base 20: mod_base = OTHER; note = deoxy-thymine phosphorothioate
  misc_feature 1..19: note = RNA
  misc_feature 20..21: note = DNA
ttcagcacctcccccaccctt

SEQ ID NO: 415 - DNA, 21 bp, synthetic construct
  source 1..21: mol_type = other DNA; note = Description of Artificial Sequence: Synthetic oligonucleotide; note = Description of Combined DNA/RNA Molecule: Synthetic oligonucleotide
  modified_base 15: mod_base = OTHER; note = 2'-O-methylcytidine-3'-phosphate
  modified_base 20: mod_base = OTHER; note = deoxy-thymine phosphorothioate
  misc_feature 1..19: note = RNA
  misc_feature 20..21: note = DNA
tgtgggctctctctcatcctt

SEQ ID NO: 416 - DNA, 21 bp, synthetic construct
  source 1..21: mol_type = other DNA; note = Description of Artificial Sequence: Synthetic oligonucleotide; note = Description of Combined DNA/RNA Molecule: Synthetic oligonucleotide
  modified_base 3: mod_base = OTHER; note = 2'-O-methylcytidine-3'-phosphate
  modified_base 7: mod_base = OTHER; note = 2'-O-methylcytidine-3'-phosphate
  modified_base 20: mod_base = OTHER; note = deoxy-thymine phosphorothioate
  misc_feature 1..19: note = RNA
  misc_feature 20..21: note = DNA
agcaaacaggaatgggcggtt

SEQ ID NO: 417 - DNA, 21 bp, synthetic construct
  source 1..21: mol_type = other DNA; note = Description of Artificial Sequence: Synthetic oligonucleotide; note = Description of Combined DNA/RNA Molecule: Synthetic oligonucleotide
  modified_base 2: mod_base = OTHER; note = 2'-O-methyluridine-3'-phosphate
  modified_base 4: mod_base = OTHER; note = 2'-O-methylcytidine-3'-phosphate
  modified_base 6: mod_base = OTHER; note = 2'-O-methylcytidine-3'-phosphate
  modified_base 9: mod_base = OTHER; note = 2'-O-methylcytidine-3'-phosphate
  modified_base 13: mod_base = OTHER; note = 2'-O-methylcytidine-3'-phosphate
  modified_base 20: mod_base = OTHER; note = deoxy-thymine phosphorothioate
  misc_feature 1..19: note = RNA
  misc_feature 20..21: note = DNA
atacacagcaaacaggaattt

SEQ ID NO: 418 - DNA, 21 bp, synthetic construct
  source 1..21: mol_type = other DNA; note = Description of Artificial Sequence: Synthetic oligonucleotide; note = Description of Combined DNA/RNA Molecule: Synthetic oligonucleotide
  modified_base 2: mod_base = OTHER; note = 2'-O-methylcytidine-3'-phosphate
  modified_base 4: mod_base = OTHER; note = 2'-O-methyluridine-3'-phosphate
  modified_base 6: mod_base = OTHER; note = 2'-O-methylcytidine-3'-phosphate
  modified_base 8: mod_base = OTHER; note = 2'-O-methylcytidine-3'-phosphate
  modified_base 11: mod_base = OTHER; note = 2'-O-methylcytidine-3'-phosphate
  modified_base 15: mod_base = OTHER; note = 2'-O-methylcytidine-3'-phosphate
  modified_base 20: mod_base = OTHER; note = deoxy-thymine phosphorothioate
  misc_feature 1..19: note = RNA
  misc_feature 20..21: note = DNA
tcatacacagcaaacaggatt

SEQ ID NO: 419 - DNA, 21 bp, synthetic construct
  source 1..21: mol_type = other DNA; note = Description of Artificial Sequence: Synthetic oligonucleotide; note = Description of Combined DNA/RNA Molecule: Synthetic oligonucleotide
  modified_base 6: mod_base = OTHER; note = 2'-O-methylcytidine-3'-phosphate
  modified_base 8: mod_base = OTHER; note = 2'-O-methyluridine-3'-phosphate
  modified_base 10: mod_base = OTHER; note = 2'-O-methylcytidine-3'-phosphate
  modified_base 12: mod_base = OTHER; note = 2'-O-methylcytidine-3'-phosphate
  modified_base 15: mod_base = OTHER; note = 2'-O-methylcytidine-3'-phosphate
  modified_base 20: mod_base = OTHER; note = deoxy-thymine phosphorothioate
  misc_feature 1..19: note = RNA
  misc_feature 20..21: note = DNA
ttgatcatacacagcaaactt

SEQ ID NO: 420 - DNA, 21 bp, synthetic construct
  source 1..21: mol_type = other DNA; note = Description of Artificial Sequence: Synthetic oligonucleotide; note = Description of Combined DNA/RNA Molecule: Synthetic oligonucleotide
  modified_base 7: mod_base = OTHER; note = 2'-O-methylcytidine-3'-phosphate
  modified_base 9: mod_base = OTHER; note = 2'-O-methyluridine-3'-phosphate
  modified_base 11: mod_base = OTHER; note = 2'-O-methylcytidine-3'-phosphate
  modified_base 13: mod_base = OTHER; note = 2'-O-methylcytidine-3'-phosphate
  modified_base 16: mod_base = OTHER; note = 2'-O-methylcytidine-3'-phosphate
  modified_base 20: mod_base = OTHER; note = deoxy-thymine phosphorothioate
  misc_feature 1..19: note = RNA
  misc_feature 20..21: note = DNA
tttgatcatacacagcaaatt

SEQ ID NO: 421 - DNA, 21 bp, synthetic construct
  source 1..21: mol_type = other DNA; note = Description of Artificial Sequence: Synthetic oligonucleotide; note = Description of Combined DNA/RNA Molecule: Synthetic oligonucleotide
  modified_base 20: mod_base = OTHER; note = deoxy-thymine phosphorothioate
  misc_feature 1..19: note = RNA
  misc_feature 20..21: note = DNA
aaaggtgggagactgggggtt

SEQ ID NO: 422 - DNA, 21 bp, synthetic construct
  source 1..21: mol_type = other DNA; note = Description of Artificial Sequence: Synthetic oligonucleotide; note = Description of Combined DNA/RNA Molecule: Synthetic oligonucleotide
  modified_base 1: mod_base = OTHER; note = 2'-O-methylcytidine-3'-phosphate
  modified_base 4: mod_base = OTHER; note = 2'-O-methyluridine-3'-phosphate
  modified_base 20: mod_base = OTHER; note = deoxy-thymine phosphorothioate
  misc_feature 1..19: note = RNA
  misc_feature 20..21: note = DNA
cattagaagaaaaggtgggtt

SEQ ID NO: 423 - DNA, 21 bp, synthetic construct
  source 1..21: mol_type = other DNA; note = Description of Artificial Sequence: Synthetic oligonucleotide; note = Description of Combined DNA/RNA Molecule: Synthetic oligonucleotide
  modified_base 2: mod_base = OTHER; note = 2'-O-methylcytidine-3'-phosphate
  modified_base 5: mod_base = OTHER; note = 2'-O-methyluridine-3'-phosphate
  modified_base 20: mod_base = OTHER; note = deoxy-thymine phosphorothioate
  misc_feature 1..19: note = RNA
  misc_feature 20..21: note = DNA
tcattagaagaaaaggtggtt

SEQ ID NO: 424 - DNA, 21 bp, synthetic construct
  source 1..21: mol_type = other DNA; note = Description of Artificial Sequence: Synthetic oligonucleotide; note = Description of Combined DNA/RNA Molecule: Synthetic oligonucleotide
  modified_base 3: mod_base = OTHER; note = 2'-O-methylcytidine-3'-phosphate
  modified_base 6: mod_base = OTHER; note = 2'-O-methyluridine-3'-phosphate
  modified_base 20: mod_base = OTHER; note = deoxy-thymine phosphorothioate
  misc_feature 1..19: note = RNA
  misc_feature 20..21: note = DNA
ctcattagaagaaaaggtgtt

SEQ ID NO: 425 - DNA, 21 bp, synthetic construct
  source 1..21: mol_type = other DNA; note = Description of Artificial Sequence: Synthetic oligonucleotide; note = Description of Combined DNA/RNA Molecule: Synthetic oligonucleotide
  modified_base 4: mod_base = OTHER; note = 2'-O-methyluridine-3'-phosphate
  modified_base 9: mod_base = OTHER; note = 2'-O-methylcytidine-3'-phosphate
  modified_base 20: mod_base = OTHER; note = deoxy-thymine phosphorothioate
  misc_feature 1..19: note = RNA
  misc_feature 20..21: note = DNA
acttagaccaaggagaaactt

SEQ ID NO: 426 - DNA, 21 bp, synthetic construct
  source 1..21: mol_type = other DNA; note = Description of Artificial Sequence: Synthetic oligonucleotide; note = Description of Combined DNA/RNA Molecule: Synthetic oligonucleotide
  modified_base 3: mod_base = OTHER; note = 2'-O-methyluridine-3'-phosphate
  modified_base 8: mod_base = OTHER; note = 2'-O-methyluridine-3'-phosphate
  modified_base 14: mod_base = OTHER; note = 2'-O-methylcytidine-3'-phosphate
  modified_base 17: mod_base = OTHER; note = 2'-O-methylcytidine-3'-phosphate
  modified_base 20: mod_base = OTHER; note = deoxy-thymine phosphorothioate
  misc_feature 1..19: note = RNA
  misc_feature 20..21: note = DNA
tctaaaataaacccagcaatt

SEQ ID NO: 427 - DNA, 21 bp, synthetic construct
  source 1..21: mol_type = other DNA; note = Description of Artificial Sequence: Synthetic oligonucleotide; note = Description of Combined DNA/RNA Molecule: Synthetic oligonucleotide
  modified_base 4: mod_base = OTHER; note = 2'-O-methyluridine-3'-phosphate
  modified_base 9: mod_base = OTHER; note = 2'-O-methyluridine-3'-phosphate
  modified_base 15: mod_base = OTHER; note = 2'-O-methylcytidine-3'-phosphate
  modified_base 18: mod_base = OTHER; note = 2'-O-methylcytidine-3'-phosphate
  modified_base 20: mod_base = OTHER; note = deoxy-thymine phosphorothioate
  misc_feature 1..19: note = RNA
  misc_feature 20..21: note = DNA
ctctaaaataaacccagcatt

SEQ ID NO: 428 - DNA, 21 bp, synthetic construct
  source 1..21: mol_type = other DNA; note = Description of Artificial Sequence: Synthetic oligonucleotide; note = Description of Combined DNA/RNA Molecule: Synthetic oligonucleotide
  modified_base 5: mod_base = OTHER; note = 2'-O-methyluridine-3'-phosphate
  modified_base 10: mod_base = OTHER; note = 2'-O-methyluridine-3'-phosphate
  modified_base 16: mod_base = OTHER; note = 2'-O-methylcytidine-3'-phosphate
  modified_base 20: mod_base = OTHER; note = deoxy-thymine phosphorothioate
  misc_feature 1..19: note = RNA
  misc_feature 20..21: note = DNA
tctctaaaataaacccagctt

SEQ ID NO: 429 - DNA, 21 bp, synthetic construct
  source 1..21: mol_type = other DNA; note = Description of Artificial Sequence: Synthetic oligonucleotide; note = Description of Combined DNA/RNA Molecule: Synthetic oligonucleotide
  modified_base 6: mod_base = OTHER; note = 2'-O-methyluridine-3'-phosphate
  modified_base 11: mod_base = OTHER; note = 2'-O-methyluridine-3'-phosphate
  modified_base 17: mod_base = OTHER; note = 2'-O-methylcytidine-3'-phosphate
  modified_base 20: mod_base = OTHER; note = deoxy-thymine phosphorothioate
  misc_feature 1..19: note = RNA
  misc_feature 20..21: note = DNA
ttctctaaaataaacccagtt

SEQ ID NO: 430 - DNA, 21 bp, synthetic construct
  source 1..21: mol_type = other DNA; note = Description of Artificial Sequence: Synthetic oligonucleotide; note = Description of Combined DNA/RNA Molecule: Synthetic oligonucleotide
  modified_base 7: mod_base = OTHER; note = 2'-O-methyluridine-3'-phosphate
  modified_base 12: mod_base = OTHER; note = 2'-O-methyluridine-3'-phosphate
  modified_base 18: mod_base = OTHER; note = 2'-O-methylcytidine-3'-phosphate
  modified_base 20: mod_base = OTHER; note = deoxy-thymine phosphorothioate
  misc_feature 1..19: note = RNA
  misc_feature 20..21: note = DNA
attctctaaaataaacccatt

SEQ ID NO: 431 - DNA, 21 bp, synthetic construct
  source 1..21: mol_type = other DNA; note = Description of Artificial Sequence: Synthetic oligonucleotide; note = Description of Combined DNA/RNA Molecule: Synthetic oligonucleotide
  modified_base 3: mod_base = OTHER; note = 2'-O-methylcytidine-3'-phosphate
  modified_base 10: mod_base = OTHER; note = 2'-O-methyluridine-3'-phosphate
  modified_base 15: mod_base = OTHER; note = 2'-O-methyluridine-3'-phosphate
  modified_base 20: mod_base = OTHER; note = deoxy-thymine phosphorothioate
  misc_feature 1..19: note = RNA
  misc_feature 20..21: note = DNA
cccattctctaaaataaactt

SEQ ID NO: 432 - DNA, 21 bp, synthetic construct
  source 1..21: mol_type = other DNA; note = Description of Artificial Sequence: Synthetic oligonucleotide; note = Description of Combined DNA/RNA Molecule: Synthetic oligonucleotide
  modified_base 6: mod_base = OTHER; note = 2'-O-methylcytidine-3'-phosphate
  modified_base 13: mod_base = OTHER; note = 2'-O-methyluridine-3'-phosphate
  modified_base 18: mod_base = OTHER; note = 2'-O-methyluridine-3'-phosphate
  modified_base 20: mod_base = OTHER; note = deoxy-thymine phosphorothioate
  misc_feature 1..19: note = RNA
  misc_feature 20..21: note = DNA
acccccattctctaaaatatt

SEQ ID NO: 433 - DNA, 21 bp, synthetic construct
  source 1..21: mol_type = other DNA; note = Description of Artificial Sequence: Synthetic oligonucleotide; note = Description of Combined DNA/RNA Molecule: Synthetic oligonucleotide
  modified_base 18: mod_base = OTHER; note = 2'-O-methylcytidine-3'-phosphate
  modified_base 20: mod_base = OTHER; note = deoxy-thymine phosphorothioate
  misc_feature 1..19: note = RNA
  misc_feature 20..21: note = DNA
actggttcttgcctccccatt

SEQ ID NO: 434 - DNA, 21 bp, synthetic construct
  source 1..21: mol_type = other DNA; note = Description of Artificial Sequence: Synthetic oligonucleotide; note = Description of Combined DNA/RNA Molecule: Synthetic oligonucleotide
  modified_base 3: mod_base = OTHER; note = 2'-O-methylcytidine-3'-phosphate
  modified_base 20: mod_base = OTHER; note = deoxy-thymine phosphorothioate
  misc_feature 1..19: note = RNA
  misc_feature 20..21: note = DNA
aacactggttcttgcctcctt

SEQ ID NO: 435 - DNA, 21 bp, synthetic construct
  source 1..21: mol_type = other DNA; note = Description of Artificial Sequence: Synthetic oligonucleotide; note = Description of Combined DNA/RNA Molecule: Synthetic oligonucleotide
  modified_base 20: mod_base = OTHER; note = deoxy-thymine phosphorothioate
  misc_feature 1..19: note = RNA
  misc_feature 20..21: note = DNA
ggttggaattctttttggatt

SEQ ID NO: 436 - DNA, 21 bp, synthetic construct
  source 1..21: mol_type = other DNA; note = Description of Artificial Sequence: Synthetic oligonucleotide; note = Description of Combined DNA/RNA Molecule: Synthetic oligonucleotide
  modified_base 20: mod_base = OTHER; note = deoxy-thymine phosphorothioate
  misc_feature 1..19: note = RNA
  misc_feature 20..21: note = DNA
tcggttggaattctttttgtt

SEQ ID NO: 437 - DNA, 21 bp, synthetic construct
  source 1..21: mol_type = other DNA; note = Description of Artificial Sequence: Synthetic oligonucleotide; note = Description of Combined DNA/RNA Molecule: Synthetic oligonucleotide
  modified_base 4: mod_base = OTHER; note = 2'-O-methylcytidine-3'-phosphate
  modified_base 20: mod_base = OTHER; note = deoxy-thymine phosphorothioate
  misc_feature 1..19: note = RNA
  misc_feature 20..21: note = DNA
aaacaagctggtcggttggtt

SEQ ID NO: 438 - DNA, 21 bp, synthetic construct
  source 1..21: mol_type = other DNA; note = Description of Artificial Sequence: Synthetic oligonucleotide; note = Description of Combined DNA/RNA Molecule: Synthetic oligonucleotide
  modified_base 2: mod_base = OTHER; note = 2'-O-methylcytidine-3'-phosphate
  modified_base 4: mod_base = OTHER; note = 2'-O-methylcytidine-3'-phosphate
  modified_base 8: mod_base = OTHER; note = 2'-O-methylcytidine-3'-phosphate
  modified_base 20: mod_base = OTHER; note = deoxy-thymine phosphorothioate
  misc_feature 1..19: note = RNA
  misc_feature 20..21: note = DNA
tcacaaacaagctggtcggtt

SEQ ID NO: 439 - DNA, 21 bp, synthetic construct
  source 1..21: mol_type = other DNA; note = Description of Artificial Sequence: Synthetic oligonucleotide; note = Description of Combined DNA/RNA Molecule: Synthetic oligonucleotide
  modified_base 3: mod_base = OTHER; note = 2'-O-methylcytidine-3'-phosphate
  modified_base 5: mod_base = OTHER; note = 2'-O-methylcytidine-3'-phosphate
  modified_base 9: mod_base = OTHER; note = 2'-O-methylcytidine-3'-phosphate
  modified_base 20: mod_base = OTHER; note = deoxy-thymine phosphorothioate
  misc_feature 1..19: note = RNA
  misc_feature 20..21: note = DNA
ttcacaaacaagctggtcgtt

SEQ ID NO: 440 - DNA, 21 bp, synthetic construct
  source 1..21: mol_type = other DNA; note = Description of Artificial Sequence: Synthetic oligonucleotide; note = Description of Combined DNA/RNA Molecule: Synthetic oligonucleotide
  modified_base 4: mod_base = OTHER; note = 2'-O-methylcytidine-3'-phosphate
  modified_base 6: mod_base = OTHER; note = 2'-O-methylcytidine-3'-phosphate
  modified_base 10: mod_base = OTHER; note = 2'-O-methylcytidine-3'-phosphate
  modified_base 20: mod_base = OTHER; note = deoxy-thymine phosphorothioate
  misc_feature 1..19: note = RNA
  misc_feature 20..21: note = DNA
tttcacaaacaagctggtctt

SEQ ID NO: 441 - DNA, 21 bp, synthetic construct
  source 1..21: mol_type = other DNA; note = Description of Artificial Sequence: Synthetic oligonucleotide; note = Description of Combined DNA/RNA Molecule: Synthetic oligonucleotide
  modified_base 9: mod_base = OTHER; note = 2'-O-methylcytidine-3'-phosphate
  modified_base 11: mod_base = OTHER; note = 2'-O-methylcytidine-3'-phosphate
  modified_base 15: mod_base = OTHER; note = 2'-O-methylcytidine-3'-phosphate
  modified_base 20: mod_base = OTHER; note = deoxy-thymine phosphorothioate
  misc_feature 1..19: note = RNA
  misc_feature 20..21: note = DNA
ttttgtttcacaaacaagctt

SEQ ID NO: 442 - DNA, 21 bp, synthetic construct
  source 1..21: mol_type = other DNA; note = Description of Artificial Sequence: Synthetic oligonucleotide; note = Description of Combined DNA/RNA Molecule: Synthetic oligonucleotide
  modified_base 10: mod_base = OTHER; note = 2'-O-methylcytidine-3'-phosphate
  modified_base 12: mod_base = OTHER; note = 2'-O-methylcytidine-3'-phosphate
  modified_base 16: mod_base = OTHER; note = 2'-O-methylcytidine-3'-phosphate
  modified_base 20: mod_base = OTHER; note = deoxy-thymine phosphorothioate
  misc_feature 1..19: note = RNA
  misc_feature 20..21: note = DNA
tttttgtttcacaaacaagtt

SEQ ID NO: 443 - DNA, 21 bp, synthetic construct
  source 1..21: mol_type = other DNA; note = Description of Artificial Sequence: Synthetic oligonucleotide; note = Description of Combined DNA/RNA Molecule: Synthetic oligonucleotide
  modified_base 11: mod_base = OTHER; note = 2'-O-methylcytidine-3'-phosphate
  modified_base 13: mod_base = OTHER; note = 2'-O-methylcytidine-3'-phosphate
  modified_base 17: mod_base = OTHER; note = 2'-O-methylcytidine-3'-phosphate
  modified_base 20: mod_base = OTHER; note = deoxy-thymine phosphorothioate
  misc_feature 1..19: note = RNA
  misc_feature 20..21: note = DNA
ttttttgtttcacaaacaatt

SEQ ID NO: 444 - DNA, 21 bp, synthetic construct
  source 1..21: mol_type = other DNA; note = Description of Artificial Sequence: Synthetic oligonucleotide; note = Description of Combined DNA/RNA Molecule: Synthetic oligonucleotide
  modified_base 13: mod_base = OTHER; note = 2'-O-methylcytidine-3'-phosphate
  modified_base 15: mod_base = OTHER; note = 2'-O-methylcytidine-3'-phosphate
  modified_base 20: mod_base = OTHER; note = deoxy-thymine phosphorothioate
  misc_feature 1..19: note = RNA
  misc_feature 20..21: note = DNA
acttttttgtttcacaaactt

SEQ ID NO: 445 - DNA, 21 bp, synthetic construct
  source 1..21: mol_type = other DNA; note = Description of Artificial Sequence: Synthetic oligonucleotide; note = Description of Combined DNA/RNA Molecule: Synthetic oligonucleotide
  modified_base 2: mod_base = OTHER; note = 2'-O-methylcytidine-3'-phosphate
  modified_base 15: mod_base = OTHER; note = 2'-O-methylcytidine-3'-phosphate
  modified_base 17: mod_base = OTHER; note = 2'-O-methylcytidine-3'-phosphate
  modified_base 20: mod_base = OTHER; note = deoxy-thymine phosphorothioate
  misc_feature 1..19: note = RNA
  misc_feature 20..21: note = DNA
acacttttttgtttcacaatt

SEQ ID NO: 446 - DNA, 21 bp, synthetic construct
  source 1..21: mol_type = other DNA; note = Description of Artificial Sequence: Synthetic oligonucleotide; note = Description of Combined DNA/RNA Molecule: Synthetic oligonucleotide
  modified_base 5: mod_base = OTHER; note = 2'-O-methylcytidine-3'-phosphate
  modified_base 18: mod_base = OTHER; note = 2'-O-methylcytidine-3'-phosphate
  modified_base 20: mod_base = OTHER; note = deoxy-thymine phosphorothioate
  misc_feature 1..19: note = RNA
  misc_feature 20..21: note = DNA
ggaacacttttttgtttcatt

SEQ ID NO: 447 - DNA, 21 bp, synthetic construct
  source 1..21: mol_type = other DNA; note = Description of Artificial Sequence: Synthetic oligonucleotide; note = Description of Combined DNA/RNA Molecule: Synthetic oligonucleotide
  modified_base 10: mod_base = OTHER; note = 2'-O-methylcytidine-3'-phosphate
  modified_base 20: mod_base = OTHER; note = deoxy-thymine phosphorothioate
  misc_feature 1..19: note = RNA
  misc_feature 20..21: note = DNA
aaaagggaacacttttttgtt

SEQ ID NO: 448 - DNA, 21 bp, synthetic construct
  source 1..21: mol_type = other DNA; note = Description of Artificial Sequence: Synthetic oligonucleotide; note = Description of Combined DNA/RNA Molecule: Synthetic oligonucleotide
  modified_base 12: mod_base = OTHER; note = 2'-O-methylcytidine-3'-phosphate
  modified_base 20: mod_base = OTHER; note = deoxy-thymine phosphorothioate
  misc_feature 1..19: note = RNA
  misc_feature 20..21: note = DNA
tgaaaagggaacacttttttt

SEQ ID NO: 449 - DNA, 21 bp, synthetic construct
  source 1..21: mol_type = other DNA; note = Description of Artificial Sequence: Synthetic oligonucleotide; note = Description of Combined DNA/RNA Molecule: Synthetic oligonucleotide
  modified_base 13: mod_base = OTHER; note = 2'-O-methylcytidine-3'-phosphate
  modified_base 20: mod_base = OTHER; note = deoxy-thymine phosphorothioate
  misc_feature 1..19: note = RNA
  misc_feature 20..21: note = DNA
ttgaaaagggaacactttttt

SEQ ID NO: 450 - DNA, 21 bp, synthetic construct
  source 1..21: mol_type = other DNA; note = Description of Artificial Sequence: Synthetic oligonucleotide; note = Description of Combined DNA/RNA Molecule: Synthetic oligonucleotide
  modified_base 4: mod_base = OTHER; note = 2'-O-methylcytidine-3'-phosphate
  modified_base 20: mod_base = OTHER; note = deoxy-thymine phosphorothioate
  misc_feature 1..19: note = RNA
  misc_feature 20..21: note = DNA
tctcaacttgaaaagggaatt

SEQ ID NO: 451 - DNA, 21 bp, synthetic construct
  source 1..21: mol_type = other DNA; note = Description of Artificial Sequence: Synthetic oligonucleotide; note = Description of Combined DNA/RNA Molecule: Synthetic oligonucleotide
  modified_base 7: mod_base = OTHER; note = 2'-O-methylcytidine-3'-phosphate
  modified_base 20: mod_base = OTHER; note = deoxy-thymine phosphorothioate
  misc_feature 1..19: note = RNA
  misc_feature 20..21: note = DNA
tgttctcaacttgaaaaggtt

SEQ ID NO: 452 - DNA, 21 bp, synthetic construct
  source 1..21: mol_type = other DNA; note = Description of Artificial Sequence: Synthetic oligonucleotide; note = Description of Combined DNA/RNA Molecule: Synthetic oligonucleotide
  modified_base 10: mod_base = OTHER; note = 2'-O-methylcytidine-3'-phosphate
  modified_base 20: mod_base = OTHER; note = deoxy-thymine phosphorothioate
  misc_feature 1..19: note = RNA
  misc_feature 20..21: note = DNA
ttttgttctcaacttgaaatt

SEQ ID NO: 453 - DNA, 21 bp, synthetic construct
  source 1..21: mol_type = other DNA; note = Description of Artificial Sequence: Synthetic oligonucleotide; note = Description of Combined DNA/RNA Molecule: Synthetic oligonucleotide
  modified_base 11: mod_base = OTHER; note = 2'-O-methylcytidine-3'-phosphate
  modified_base 20: mod_base = OTHER; note = deoxy-thymine phosphorothioate
  misc_feature 1..19: note = RNA
  misc_feature 20..21: note = DNA
tttttgttctcaacttgaatt

SEQ ID NO: 454 - DNA, 21 bp, synthetic construct
  source 1..21: mol_type = other DNA; note = Description of Artificial Sequence: Synthetic oligonucleotide; note = Description of Combined DNA/RNA Molecule: Synthetic oligonucleotide
  modified_base 13: mod_base = OTHER; note = 2'-O-methylcytidine-3'-phosphate
  modified_base 20: mod_base = OTHER; note = deoxy-thymine phosphorothioate
  misc_feature 1..19: note = RNA
  misc_feature 20..21: note = DNA
aatttttgttctcaacttgtt

SEQ ID NO: 455 - DNA, 21 bp, synthetic construct
  source 1..21: mol_type = other DNA; note = Description of Artificial Sequence: Synthetic oligonucleotide; note = Description of Combined DNA/RNA Molecule: Synthetic oligonucleotide
  modified_base 2: mod_base = OTHER; note = 2'-O-methylcytidine-3'-phosphate
  modified_base 15: mod_base = OTHER; note = 2'-O-methylcytidine-3'-phosphate
  modified_base 20: mod_base = OTHER; note = deoxy-thymine phosphorothioate
  misc_feature 1..19: note = RNA
  misc_feature 20..21: note = DNA
ccaatttttgttctcaacttt

SEQ ID NO: 456 - DNA, 21 bp, synthetic construct
  source 1..21: mol_type = other DNA; note = Description of Artificial Sequence: Synthetic oligonucleotide; note = Description of Combined DNA/RNA Molecule: Synthetic oligonucleotide
  modified_base 3: mod_base = OTHER; note = 2'-O-methylcytidine-3'-phosphate
  modified_base 16: mod_base = OTHER; note = 2'-O-methylcytidine-3'-phosphate
  modified_base 20: mod_base = OTHER; note = deoxy-thymine phosphorothioate
  misc_feature 1..19: note = RNA
  misc_feature 20..21: note = DNA
cccaatttttgttctcaactt

SEQ ID NO: 457 - DNA, 21 bp, synthetic construct
  source 1..21: mol_type = other DNA; note = Description of Artificial Sequence: Synthetic oligonucleotide; note = Description of Combined DNA/RNA Molecule: Synthetic oligonucleotide
  modified_base 5: mod_base = OTHER; note = 2'-O-methylcytidine-3'-phosphate
  modified_base 18: mod_base = OTHER; note = 2'-O-methylcytidine-3'-phosphate
  modified_base 20: mod_base = OTHER; note = deoxy-thymine phosphorothioate
  misc_feature 1..19: note = RNA
  misc_feature 20..21: note = DNA
aacccaatttttgttctcatt

SEQ ID NO: 458 - DNA, 21 bp, synthetic construct
  source 1..21: mol_type = other DNA; note = Description of Artificial Sequence: Synthetic oligonucleotide; note = Description of Combined DNA/RNA Molecule: Synthetic oligonucleotide
  modified_base 6: mod_base = OTHER; note = 2'-O-methylcytidine-3'-phosphate
  modified_base 20: mod_base = OTHER; note = deoxy-thymine phosphorothioate
  misc_feature 1..19: note = RNA
  misc_feature 20..21: note = DNA
aaacccaatttttgttctctt

SEQ ID NO: 459 - DNA, 21 bp, synthetic construct
  source 1..21: mol_type = other DNA; note = Description of Artificial Sequence: Synthetic oligonucleotide; note = Description of Combined DNA/RNA Molecule: Synthetic oligonucleotide
  modified_base 1: mod_base = OTHER; note = 2'-O-methyluridine-3'-phosphate
  modified_base 8: mod_base = OTHER; note = 2'-O-methylcytidine-3'-phosphate
  modified_base 20: mod_base = OTHER; note = deoxy-thymine phosphorothioate
  misc_feature 1..19: note = RNA
  misc_feature 20..21: note = DNA
taaaacccaatttttgttctt

SEQ ID NO: 460 - DNA, 21 bp, synthetic construct
  source 1..21: mol_type = other DNA; note = Description of Artificial Sequence: Synthetic oligonucleotide; note = Description of Combined DNA/RNA Molecule: Synthetic oligonucleotide
  modified_base 2: mod_base = OTHER; note = 2'-O-methyluridine-3'-phosphate
  modified_base 9: mod_base = OTHER; note = 2'-O-methylcytidine-3'-phosphate
  modified_base 20: mod_base = OTHER; note = deoxy-thymine phosphorothioate
  misc_feature 1..19: note = RNA
  misc_feature 20..21: note = DNA
ttaaaacccaatttttgtttt

SEQ ID NO: 461 - DNA, 21 bp, synthetic construct
  source 1..21: mol_type = other DNA; note = Description of Artificial Sequence: Synthetic oligonucleotide; note = Description of Combined DNA/RNA Molecule: Synthetic oligonucleotide
  modified_base 3: mod_base = OTHER; note = 2'-O-methyluridine-3'-phosphate
  modified_base 10: mod_base = OTHER; note = 2'-O-methylcytidine-3'-phosphate
  modified_base 20: mod_base = OTHER; note = deoxy-thymine phosphorothioate
  misc_feature 1..19: note = RNA
  misc_feature 20..21: note = DNA
tttaaaacccaatttttgttt

SEQ ID NO: 462 - DNA, 21 bp, synthetic construct
  source 1..21: mol_type = other DNA; note = Description of Artificial Sequence: Synthetic oligonucleotide; note = Description of Combined DNA/RNA Molecule: Synthetic oligonucleotide
  modified_base 4: mod_base = OTHER; note = 2'-O-methyluridine-3'-phosphate
  modified_base 11: mod_base = OTHER; note = 2'-O-methylcytidine-3'-phosphate
  modified_base 20: mod_base = OTHER; note = deoxy-thymine phosphorothioate
  misc_feature 1..19: note = RNA
  misc_feature 20..21: note = DNA
ttttaaaacccaatttttgtt

SEQ ID NO: 463 - DNA, 21 bp, synthetic construct
  source 1..21: mol_type = other DNA; note = Description of Artificial Sequence: Synthetic oligonucleotide; note = Description of Combined DNA/RNA Molecule: Synthetic oligonucleotide
  modified_base 3: mod_base = OTHER; note = 2'-O-methyluridine-3'-phosphate
  modified_base 9: mod_base = OTHER; note = 2'-O-methyluridine-3'-phosphate
  modified_base 16: mod_base = OTHER; note = 2'-O-methylcytidine-3'-phosphate
  modified_base 20: mod_base = OTHER; note = deoxy-thymine phosphorothioate
  misc_feature 1..19: note = RNA
  misc_feature 20..21: note = DNA
tttaattttaaaacccaattt

SEQ ID NO: 464 - DNA, 21 bp, synthetic construct
  source 1..21: mol_type = other DNA; note = Description of Artificial Sequence: Synthetic oligonucleotide; note = Description of Combined DNA/RNA Molecule: Synthetic oligonucleotide
  modified_base 4: mod_base = OTHER; note = 2'-O-methyluridine-3'-phosphate
  modified_base 10: mod_base = OTHER; note = 2'-O-methyluridine-3'-phosphate
  modified_base 17: mod_base = OTHER; note = 2'-O-methylcytidine-3'-phosphate
  modified_base 20: mod_base = OTHER; note = deoxy-thymine phosphorothioate
  misc_feature 1..19: note = RNA
  misc_feature 20..21: note = DNA
ctttaattttaaaacccaatt

SEQ ID NO: 465 - DNA, 21 bp, synthetic construct
  source 1..21: mol_type = other DNA; note = Description of Artificial Sequence: Synthetic oligonucleotide; note = Description of Combined DNA/RNA Molecule: Synthetic oligonucleotide
  modified_base 5: mod_base = OTHER; note = 2'-O-methyluridine-3'-phosphate
  modified_base 11: mod_base = OTHER; note = 2'-O-methyluridine-3'-phosphate
  modified_base 18: mod_base = OTHER; note = 2'-O-methylcytidine-3'-phosphate
  modified_base 20: mod_base = OTHER; note = deoxy-thymine phosphorothioate
  misc_feature 1..19: note = RNA
  misc_feature 20..21: note = DNA
actttaattttaaaacccatt

SEQ ID NO: 466 - DNA, 21 bp, synthetic construct
  source 1..21: mol_type = other DNA; note = Description of Artificial Sequence: Synthetic oligonucleotide; note = Description of Combined DNA/RNA Molecule: Synthetic oligonucleotide
  modified_base 3: mod_base = OTHER; note = 2'-O-methyluridine-3'-phosphate
  modified_base 5: mod_base = OTHER; note = 2'-O-methyluridine-3'-phosphate
  modified_base 10: mod_base = OTHER; note = 2'-O-methyluridine-3'-phosphate
  modified_base 16: mod_base = OTHER; note = 2'-O-methyluridine-3'-phosphate
  modified_base 20: mod_base = OTHER; note = deoxy-thymine phosphorothioate
  misc_feature 1..19: note = RNA
  misc_feature 20..21: note = DNA
tgtatactttaattttaaatt

SEQ ID NO: 467 - DNA, 21 bp, synthetic construct
  source 1..21: mol_type = other DNA; note = Description of Artificial Sequence: Synthetic oligonucleotide; note = Description of Combined DNA/RNA Molecule: Synthetic oligonucleotide
  modified_base 4: mod_base = OTHER; note = 2'-O-methyluridine-3'-phosphate
  modified_base 6: mod_base = OTHER; note = 2'-O-methyluridine-3'-phosphate
  modified_base 11: mod_base = OTHER; note = 2'-O-methyluridine-3'-phosphate
  modified_base 17: mod_base = OTHER; note = 2'-O-methyluridine-3'-phosphate
  modified_base 20: mod_base = OTHER; note = deoxy-thymine phosphorothioate
  misc_feature 1..19: note = RNA
  misc_feature 20..21: note = DNA
atgtatactttaattttaatt

SEQ ID NO: 468 - DNA, 21 bp, synthetic construct
  source 1..21: mol_type = other DNA; note = Description of Artificial Sequence: Synthetic oligonucleotide; note = Description of Combined DNA/RNA Molecule: Synthetic oligonucleotide
  modified_base 3: mod_base = OTHER; note = 2'-O-methylcytidine-3'-phosphate
  modified_base 8: mod_base = OTHER; note = 2'-O-methylcytidine-3'-phosphate
  modified_base 11: mod_base = OTHER; note = 2'-O-methyluridine-3'-phosphate
  modified_base 15: mod_base = OTHER; note = 2'-O-methyluridine-3'-phosphate
  modified_base 17: mod_base = OTHER; note = 2'-O-methylcytidine-3'-phosphate
  modified_base 20: mod_base = OTHER; note = deoxy-thymine phosphorothioate
  misc_feature 1..19: note = RNA
  misc_feature 20..21: note = DNA
ttcaagacactaaatacaatt

SEQ ID NO: 469 - DNA, 21 bp, synthetic construct
  source 1..21: mol_type = other DNA; note = Description of Artificial Sequence: Synthetic oligonucleotide; note = Description of Combined DNA/RNA Molecule: Synthetic oligonucleotide
  modified_base 4: mod_base = OTHER; note = 2'-O-methylcytidine-3'-phosphate
  modified_base 9: mod_base = OTHER; note = 2'-O-methylcytidine-3'-phosphate
  modified_base 12: mod_base = OTHER; note = 2'-O-methyluridine-3'-phosphate
  modified_base 16: mod_base = OTHER; note = 2'-O-methyluridine-3'-phosphate
  modified_base 18: mod_base = OTHER; note = 2'-O-methylcytidine-3'-phosphate
  modified_base 20: mod_base = OTHER; note = deoxy-thymine phosphorothioate
  misc_feature 1..19: note = RNA
  misc_feature 20..21: note = DNA
attcaagacactaaatacatt

SEQ ID NO: 470 - DNA, 21 bp, synthetic construct
  source 1..21: mol_type = other DNA; note = Description of Artificial Sequence: Synthetic oligonucleotide; note = Description of Combined DNA/RNA Molecule: Synthetic oligonucleotide
  modified_base 4: mod_base = OTHER; note = 2'-O-methyluridine-3'-phosphate
  modified_base 6: mod_base = OTHER; note = 2'-O-methylcytidine-3'-phosphate
  modified_base 10: mod_base = OTHER; note = 2'-O-methylcytidine-3'-phosphate
  modified_base 15: mod_base = OTHER; note = 2'-O-methylcytidine-3'-phosphate
  modified_base 18: mod_base = OTHER; note = 2'-O-methyluridine-3'-phosphate
  modified_base 20: mod_base = OTHER; note = deoxy-thymine phosphorothioate
  misc_feature 1..19: note = RNA
  misc_feature 20..21: note = DNA
tcttacattcaagacactatt

SEQ ID NO: 471 - DNA, 21 bp, synthetic construct
  source 1..21: mol_type = other DNA; note = Description of Artificial Sequence: Synthetic oligonucleotide; note = Description of Combined DNA/RNA Molecule: Synthetic oligonucleotide
  modified_base 2: mod_base = OTHER; note = 2'-O-methylcytidine-3'-phosphate
  modified_base 10: mod_base = OTHER; note = 2'-O-methyluridine-3'-phosphate
  modified_base 12: mod_base = OTHER; note = 2'-O-methylcytidine-3'-phosphate
  modified_base 16: mod_base = OTHER; note = 2'-O-methylcytidine-3'-phosphate
  modified_base 20: mod_base = OTHER; note = deoxy-thymine phosphorothioate
  misc_feature 1..19: note = RNA
  misc_feature 20..21: note = DNA
tcatgttcttacattcaagtt

SEQ ID NO: 472 - DNA, 21 bp, synthetic construct
  source 1..21: mol_type = other DNA; note = Description of Artificial Sequence: Synthetic oligonucleotide; note = Description of Combined DNA/RNA Molecule: Synthetic oligonucleotide
  modified_base 3: mod_base = OTHER; note = 2'-O-methylcytidine-3'-phosphate
  modified_base 11: mod_base = OTHER; note = 2'-O-methyluridine-3'-phosphate
  modified_base 13: mod_base = OTHER; note = 2'-O-methylcytidine-3'-phosphate
  modified_base 17: mod_base = OTHER; note = 2'-O-methylcytidine-3'-phosphate
  modified_base 20: mod_base = OTHER; note = deoxy-thymine phosphorothioate
  misc_feature 1..19: note = RNA
  misc_feature 20..21: note = DNA
gtcatgttcttacattcaatt

SEQ ID NO: 473 - DNA, 21 bp, synthetic construct
  source 1..21: mol_type = other DNA; note = Description of Artificial Sequence: Synthetic oligonucleotide; note = Description of Combined DNA/RNA Molecule: Synthetic oligonucleotide
  modified_base 16: mod_base = OTHER; note = 2'-O-methyluridine-3'-phosphate
  modified_base 20: mod_base = OTHER; note = deoxy-thymine phosphorothioate
  misc_feature 1..19: note = RNA
  misc_feature 20..21: note = DNA
atctgtggaaaaaactaagtt

SEQ ID NO: 474 - DNA, 21 bp, synthetic construct
  source 1..21: mol_type = other DNA; note = Description of Artificial Sequence: Synthetic oligonucleotide; note = Description of Combined DNA/RNA Molecule: Synthetic oligonucleotide
  modified_base 5: mod_base = OTHER; note = 2'-O-methylcytidine-3'-phosphate
  modified_base 7: mod_base = OTHER; note = 2'-O-methylcytidine-3'-phosphate
  modified_base 11: mod_base = OTHER; note = 2'-O-methylcytidine-3'-phosphate
  modified_base 20: mod_base = OTHER; note = deoxy-thymine phosphorothioate
  misc_feature 1..19: note = RNA
  misc_feature 20..21: note = DNA
aaatcacaagcatctgtggtt

SEQ ID NO: 475 - DNA, 21 bp, synthetic construct
  source 1..21: mol_type = other DNA; note = Description of Artificial Sequence: Synthetic oligonucleotide; note = Description of Combined DNA/RNA Molecule: Synthetic oligonucleotide
  modified_base 7: mod_base = OTHER; note = 2'-O-methylcytidine-3'-phosphate
  modified_base 9: mod_base = OTHER; note = 2'-O-methylcytidine-3'-phosphate
  modified_base 13: mod_base = OTHER; note = 2'-O-methylcytidine-3'-phosphate
  modified_base 20: mod_base = OTHER; note = deoxy-thymine phosphorothioate
  misc_feature 1..19: note = RNA
  misc_feature 20..21: note = DNA
aaaaatcacaagcatctgttt

SEQ ID NO: 476 - DNA, 21 bp, synthetic construct
  source 1..21: mol_type = other DNA; note = Description of Artificial Sequence: Synthetic oligonucleotide; note = Description of Combined DNA/RNA Molecule: Synthetic oligonucleotide
  modified_base 1: mod_base = OTHER; note = 2'-O-methylcytidine-3'-phosphate
  modified_base 5: mod_base = OTHER; note = 2'-O-methylcytidine-3'-phosphate
  modified_base 9: mod_base = OTHER; note = 2'-O-methylcytidine-3'-phosphate
  modified_base 17: mod_base = OTHER; note = 2'-O-methylcytidine-3'-phosphate
  modified_base 20: mod_base = OTHER; note = deoxy-thymine phosphorothioate
  misc_feature 1..19: note = RNA
  misc_feature 20..21: note = DNA
cattcaaacagaaattcagtt

SEQ ID NO: 477 - DNA, 21 bp, synthetic construct
  source 1..21: mol_type = other DNA; note = Description of Artificial Sequence: Synthetic oligonucleotide; note = Description of Combined DNA/RNA Molecule: Synthetic oligonucleotide
  modified_base 5: mod_base = OTHER; note = 2'-O-methyluridine-3'-phosphate
  modified_base 9: mod_base = OTHER; note = 2'-O-methylcytidine-3'-phosphate
  modified_base 13: mod_base = OTHER; note = 2'-O-methyluridine-3'-phosphate
  modified_base 20: mod_base = OTHER; note = deoxy-thymine phosphorothioate
  misc_feature 1..19: note = RNA
  misc_feature 20..21: note = DNA
gaaataaccagctatggtttt

SEQ ID NO: 478 - DNA, 21 bp, synthetic construct
  source 1..21: mol_type = other DNA; note = Description of Artificial Sequence: Synthetic oligonucleotide; note = Description of Combined DNA/RNA Molecule: Synthetic oligonucleotide
  modified_base 7: mod_base = OTHER; note = 2'-O-methyluridine-3'-phosphate
  modified_base 11: mod_base = OTHER; note = 2'-O-methylcytidine-3'-phosphate
  modified_base 15: mod_base = OTHER; note = 2'-O-methyluridine-3'-phosphate
  modified_base 20: mod_base = OTHER; note = deoxy-thymine phosphorothioate
  misc_feature 1..19: note = RNA
  misc_feature 20..21: note = DNA
gagaaataaccagctatggtt

SEQ ID NO: 479 - RNA, 21 nt, synthetic construct
  source 1..21: mol_type = other RNA; note = Description of Artificial Sequence: Synthetic oligonucleotide
cgggatgctggccaacttctt

SEQ ID NO: 480 - RNA, 21 nt, synthetic construct
  source 1..21: mol_type = other RNA; note = Description of Artificial Sequence: Synthetic oligonucleotide
aacttcttgggcttccgtata

SEQ ID NO: 481 - RNA, 21 nt, synthetic construct
  source 1..21: mol_type = other RNA; note = Description of Artificial Sequence: Synthetic oligonucleotide
ttccgtatatatggcatgcaa

SEQ ID NO: 482 - RNA, 21 nt, synthetic construct
  source 1..21: mol_type = other RNA; note = Description of Artificial Sequence: Synthetic oligonucleotide
ccgtatatatggcatgcacaa

SEQ ID NO: 483 - RNA, 21 nt, synthetic construct
  source 1..21: mol_type = other RNA; note = Description of Artificial Sequence: Synthetic oligonucleotide
agctatggggcgtggtccata

SEQ ID NO: 484 - RNA, 21 nt, synthetic construct
  source 1..21: mol_type = other RNA; note = Description of Artificial Sequence: Synthetic oligonucleotide
ctctccccaacggctgtcttt

SEQ ID NO: 485 - RNA, 21 nt, synthetic construct
  source 1..21: mol_type = other RNA; note = Description of Artificial Sequence: Synthetic oligonucleotide
tctccccaacggctgtcttta

SEQ ID NO: 486 - RNA, 21 nt, synthetic construct
  source 1..21: mol_type = other RNA; note = Description of Artificial Sequence: Synthetic oligonucleotide
tgcaggctgtgacaggatgga

SEQ ID NO: 487 - RNA, 21 nt, synthetic construct
  source 1..21: mol_type = other RNA; note = Description of Artificial Sequence: Synthetic oligonucleotide
cctggacaaggtggagggtct

SEQ ID NO: 488 - RNA, 21 nt, synthetic construct
  source 1..21: mol_type = other RNA; note = Description of Artificial Sequence: Synthetic oligonucleotide
gacaaggtggagggtctcact

SEQ ID NO: 489 - RNA, 21 nt, synthetic construct
  source 1..21: mol_type = other RNA; note = Description of Artificial Sequence: Synthetic oligonucleotide
caaggtggagggtctcacttt

SEQ ID NO: 490 - RNA, 21 nt, synthetic construct
  source 1..21: mol_type = other RNA; note = Description of Artificial Sequence: Synthetic oligonucleotide
tccagcaaaactccctcaact

SEQ ID NO: 491 - RNA, 21 nt, synthetic construct
  source 1..21: mol_type = other RNA; note = Description of Artificial Sequence: Synthetic oligonucleotide
actccctcaactggatgaaga

SEQ ID NO: 492 - RNA, 21 nt, synthetic construct
  source 1..21: mol_type = other RNA; note = Description of Artificial Sequence: Synthetic oligonucleotide
ctgaacctgcaaaaattgaga

SEQ ID NO: 493 - RNA, 21 nt, synthetic construct
  source 1..21: mol_type = other RNA; note = Description of Artificial Sequence: Synthetic oligonucleotide
gaacctgcaaaaattgagcaa

SEQ ID NO: 494 - RNA, 21 nt, synthetic construct
  source 1..21: mol_type = other RNA; note = Description of Artificial Sequence: Synthetic oligonucleotide
acctgcaaaaattgagcaata

SEQ ID NO: 495 - RNA, 21 nt, synthetic construct
  source 1..21: mol_type = other RNA; note = Description of Artificial Sequence: Synthetic oligonucleotide
cctgcaaaaattgagcaatga

SEQ ID NO: 496 - RNA, 21 nt, synthetic construct
  source 1..21: mol_type = other RNA; note = Description of Artificial Sequence: Synthetic oligonucleotide
gcggatgagagagagcccaca

SEQ ID NO: 497 - RNA, 21 nt, synthetic construct
  source 1..21: mol_type = other RNA; note = Description of Artificial Sequence: Synthetic oligonucleotide
tgtttgctgtgtatgatcaaa

SEQ ID NO: 498 - RNA, 21 nt, synthetic construct
  source 1..21: mol_type = other RNA; note = Description of Artificial Sequence: Synthetic oligonucleotide
cacccccagtctcccaccttt

SEQ ID NO: 499 - RNA, 21 nt, synthetic construct
  source 1..21: mol_type = other RNA; note = Description of Artificial Sequence: Synthetic oligonucleotide
tctcccaccttttcttctaat

SEQ ID NO: 500 - RNA, 21 nt, synthetic construct
  source 1..21: mol_type = other RNA; note = Description of Artificial Sequence: Synthetic oligonucleotide
cccaccttttcttctaatgaa

SEQ ID NO: 501 - RNA, 21 nt, synthetic construct
  source 1..21: mol_type = other RNA; note = Description of Artificial Sequence: Synthetic oligonucleotide
tccaaaaagaattccaaccga

SEQ ID NO: 502 - RNA, 21 nt, synthetic construct
  source 1..21: mol_type = other RNA; note = Description of Artificial Sequence: Synthetic oligonucleotide
ttccaaccgaccagcttgttt

SEQ ID NO: 503 - RNA, 21 nt, synthetic construct
  source 1..21: mol_type = other RNA; note = Description of Artificial Sequence: Synthetic oligonucleotide
accgaccagcttgtttgtgaa

SEQ ID NO: 504 - RNA, 21 nt, synthetic construct
  source 1..21: mol_type = other RNA; note = Description of Artificial Sequence: Synthetic oligonucleotide
ccagcttgtttgtgaaacaaa

SEQ ID NO: 505 - RNA, 21 nt, synthetic construct
  source 1..21: mol_type = other RNA; note = Description of Artificial Sequence: Synthetic oligonucleotide
cagcttgtttgtgaaacaaaa

SEQ ID NO: 506 - RNA, 21 nt, synthetic construct
  source 1..21: mol_type = other RNA; note = Description of Artificial Sequence: Synthetic oligonucleotide
aaaaaagtgttcccttttcaa

SEQ ID NO: 507 - RNA, 21 nt, synthetic construct
  source 1..21: mol_type = other RNA; note = Description of Artificial Sequence: Synthetic oligonucleotide
tgttcccttttcaagttgaga

SEQ ID NO: 508 - RNA, 21 nt, synthetic construct
  source 1..21: mol_type = other RNA; note = Description of Artificial Sequence: Synthetic oligonucleotide
aagttgagaacaaaaattgga

SEQ ID NO: 509 - RNA, 21 nt, synthetic construct
  source 1..21: mol_type = other RNA; note = Description of Artificial Sequence: Synthetic oligonucleotide
agttgagaacaaaaattgggt

SEQ ID NO: 510 - RNA, 21 nt, synthetic construct
  source 1..21: mol_type = other RNA; note = Description of Artificial Sequence: Synthetic oligonucleotide
agaacaaaaattgggttttaa

SEQ ID NO: 511 - RNA, 21 nt, synthetic construct
  source 1..21: mol_type = other RNA; note = Description of Artificial Sequence: Synthetic oligonucleotide
gaacaaaaattgggttttaaa

SEQ ID NO: 512 - RNA, 21 nt, synthetic construct
  source 1..21: mol_type = other RNA; note = Description of Artificial Sequence: Synthetic oligonucleotide
gtttgtatttagtgtcttgaa

SEQ ID NO: 513 - RNA, 21 nt, synthetic construct
  source 1..21: mol_type = other RNA; note = Description of Artificial Sequence: Synthetic oligonucleotide
tttgtatttagtgtcttgaat

SEQ ID NO: 514 - RNA, 21 nt, synthetic construct
  source 1..21: mol_type = other RNA; note = Description of Artificial Sequence: Synthetic oligonucleotide
gtcttgaatgtaagaacatga

SEQ ID NO: 515 - RNA, 21 nt, synthetic construct
  source 1..21: mol_type = other RNA; note = Description of Artificial Sequence: Synthetic oligonucleotide
tcttgaatgtaagaacatgaa

SEQ ID NO: 516 - RNA, 21 nt, synthetic construct
  source 1..21: mol_type = other RNA; note = Description of Artificial Sequence: Synthetic oligonucleotide
ttccacagatgcttgtgattt

SEQ ID NO: 517 - RNA, 23 nt, synthetic construct
  source 1..23: mol_type = other RNA; note = Description of Artificial Sequence: Synthetic oligonucleotide
aagaagttggccagcatcccgac

SEQ ID NO: 518 - RNA, 23 nt, synthetic construct
  source 1..23: mol_type = other RNA; note = Description of Artificial Sequence: Synthetic oligonucleotide
tatacggaagcccaagaagttgg

SEQ ID NO: 519 - RNA, 23 nt, synthetic construct
  source 1..23: mol_type = other RNA; note = Description of Artificial Sequence: Synthetic oligonucleotide
ttgcatgccatatatacggaagc

SEQ ID NO: 520 - RNA, 23 nt, synthetic construct
  source 1..23: mol_type = other RNA; note = Description of Artificial Sequence: Synthetic oligonucleotide
ttgtgcatgccatatatacggaa

SEQ ID NO: 521 - RNA, 23 nt, synthetic construct
  source 1..23: mol_type = other RNA; note = Description of Artificial Sequence: Synthetic oligonucleotide
tatggaccacgccccatagctca

SEQ ID NO: 522 - RNA, 23 nt, synthetic construct
  source 1..23: mol_type = other RNA; note = Description of Artificial Sequence: Synthetic oligonucleotide
aaagacagccgttggggagagga

SEQ ID NO: 523 - RNA, 23 nt, synthetic construct
  source 1..23: mol_type = other RNA; note = Description of Artificial Sequence: Synthetic oligonucleotide
taaagacagccgttggggagagg

SEQ ID NO: 524 - RNA, 23 nt, synthetic construct
  source 1..23: mol_type = other RNA; note = Description of Artificial Sequence: Synthetic oligonucleotide
tccatcctgtcacagcctgcatg

SEQ ID NO: 525 - RNA, 23 nt, synthetic construct
  source 1..23: mol_type = other RNA; note = Description of Artificial Sequence: Synthetic oligonucleotide
agaccctccaccttgtccaggtc

SEQ ID NO: 526 - RNA, 23 nt, synthetic construct
  source 1..23: mol_type = other RNA; note = Description of Artificial Sequence: Synthetic oligonucleotide
agtgagaccctccaccttgtcca

SEQ ID NO: 527 - RNA, 23 nt, synthetic construct
  source 1..23: mol_type = other RNA; note = Description of Artificial Sequence: Synthetic oligonucleotide
aaagtgagaccctccaccttgtc

SEQ ID NO: 528 - RNA, 23 nt, synthetic construct
  source 1..23: mol_type = other RNA; note = Description of Artificial Sequence: Synthetic oligonucleotide
agttgagggagttttgctggaaa

SEQ ID NO: 529 - RNA, 23 nt, synthetic construct
  source 1..23: mol_type = other RNA; note = Description of Artificial Sequence: Synthetic oligonucleotide
tcttcatccagttgagggagttt

SEQ ID NO: 530 - RNA, 23 nt, synthetic construct
  source 1..23: mol_type = other RNA; note = Description of Artificial Sequence: Synthetic oligonucleotide
tctcaatttttgcaggttcagct

SEQ ID NO: 531 - RNA, 23 nt, synthetic construct
  source 1..23: mol_type = other RNA; note = Description of Artificial Sequence: Synthetic oligonucleotide
ttgctcaatttttgcaggttcag

SEQ ID NO: 532 - RNA, 23 nt, synthetic construct
  source 1..23: mol_type = other RNA; note = Description of Artificial Sequence: Synthetic oligonucleotide
tattgctcaatttttgcaggttc

SEQ ID NO: 533 - RNA, 23 nt, synthetic construct
  source 1..23: mol_type = other RNA; note = Description of Artificial Sequence: Synthetic oligonucleotide
tcattgctcaatttttgcaggtt

SEQ ID NO: 534 - RNA, 23 nt, synthetic construct
  source 1..23: mol_type = other RNA; note = Description of Artificial Sequence: Synthetic oligonucleotide
tgtgggctctctctcatccgctt

SEQ ID NO: 535 - RNA, 23 nt, synthetic construct
  source 1..23: mol_type = other RNA; note = Description of Artificial Sequence: Synthetic oligonucleotide
tttgatcatacacagcaaacagg

SEQ ID NO: 536 - RNA, 23 nt, synthetic construct
  source 1..23: mol_type = other RNA; note = Description of Artificial Sequence: Synthetic oligonucleotide
aaaggtgggagactgggggtgac

SEQ ID NO: 537 - RNA, 23 nt, synthetic construct
  source 1..23: mol_type = other RNA; note = Description of Artificial Sequence: Synthetic oligonucleotide
attagaagaaaaggtgggagact

SEQ ID NO: 538 - RNA, 23 nt, synthetic construct
  source 1..23: mol_type = other RNA; note = Description of Artificial Sequence: Synthetic oligonucleotide
ttcattagaagaaaaggtgggag

SEQ ID NO: 539 - RNA, 23 nt, synthetic construct
  source 1..23: mol_type = other RNA; note = Description of Artificial Sequence: Synthetic oligonucleotide
tcggttggaattctttttggaac

SEQ ID NO: 540 - RNA, 23 nt, synthetic construct
  source 1..23: mol_type = other RNA; note = Description of Artificial Sequence: Synthetic oligonucleotide
aaacaagctggtcggttggaatt

SEQ ID NO: 541 - RNA, 23 nt, synthetic construct
  source 1..23: mol_type = other RNA; note = Description of Artificial Sequence: Synthetic oligonucleotide
ttcacaaacaagctggtcggttg

SEQ ID NO: 542 - RNA, 23 nt, synthetic construct
  source 1..23: mol_type = other RNA; note = Description of Artificial Sequence: Synthetic oligonucleotide
tttgtttcacaaacaagctggtc

SEQ ID NO: 543 - RNA, 23 nt, synthetic construct
  source 1..23: mol_type = other RNA; note = Description of Artificial Sequence: Synthetic oligonucleotide
ttttgtttcacaaacaagctggt

SEQ ID NO: 544 - RNA, 23 nt, synthetic construct
  source 1..23: mol_type = other RNA; note = Description of Artificial Sequence: Synthetic oligonucleotide
ttgaaaagggaacacttttttgt

SEQ ID NO: 545 - RNA, 23 nt, synthetic construct
  source 1..23: mol_type = other RNA; note = Description of Artificial Sequence: Synthetic oligonucleotide
tctcaacttgaaaagggaacact

SEQ ID NO: 546 - RNA, 23 nt, synthetic construct
  source 1..23: mol_type = other RNA; note = Description of Artificial Sequence: Synthetic oligonucleotide
tccaatttttgttctcaacttga

SEQ ID NO: 547 - RNA, 23 nt, synthetic construct
  source 1..23: mol_type = other RNA; note = Description of Artificial Sequence: Synthetic oligonucleotide
acccaatttttgttctcaacttg

SEQ ID NO: 548 - RNA, 23 nt, synthetic construct
  source 1..23: mol_type = other RNA; note = Description of Artificial Sequence: Synthetic oligonucleotide
ttaaaacccaatttttgttctca

SEQ ID NO: 549 - RNA, 23 nt, synthetic construct
  source 1..23: mol_type = other RNA; note = Description of Artificial Sequence: Synthetic oligonucleotide
tttaaaacccaatttttgttctc

SEQ ID NO: 550 - RNA, 23 nt, synthetic construct
  source 1..23: mol_type = other RNA; note = Description of Artificial Sequence: Synthetic oligonucleotide
ttcaagacactaaatacaaaccg

SEQ ID NO: 551 - RNA, 23 nt, synthetic construct
  source 1..23: mol_type = other RNA; note = Description of Artificial Sequence: Synthetic oligonucleotide
attcaagacactaaatacaaacc

SEQ ID NO: 552 - RNA, 23 nt, synthetic construct
  source 1..23: mol_type = other RNA; note = Description of Artificial Sequence: Synthetic oligonucleotide
tcatgttcttacattcaagacac

SEQ ID NO: 553 - RNA, 23 nt, synthetic construct
  source 1..23: mol_type = other RNA; note = Description of Artificial Sequence: Synthetic oligonucleotide
ttcatgttcttacattcaagaca

SEQ ID NO: 554 - RNA, 23 nt, synthetic construct
  source 1..23: mol_type = other RNA; note = Description of Artificial Sequence: Synthetic oligonucleotide
aaatcacaagcatctgtggaaaa

SEQ ID NO: 555 - RNA, 21 nt, synthetic construct
  source 1..21: mol_type = other RNA; note = Description of Artificial Sequence: Synthetic oligonucleotide
  modified_base 1: mod_base = OTHER; note = 2'-fluorocytidine-3'-phosphorothioate
  modified_base 2: mod_base = OTHER; note = 2'-O-methyladenosine-3'- phosphorothioate
  modified_base 3: mod_base = OTHER; note = 2'-fluoroguanosine-3'-phosphate
  modified_base 4: mod_base = OTHER; note = 2'-O-methylcytidine-3'-phosphate
  modified_base 5: mod_base = OTHER; note = 2'-fluorouridine-3'-phosphate
  modified_base 6: mod_base = OTHER; note = 2'-O-methyluridine-3'-phosphate
  modified_base 7: mod_base = OTHER; note = 2'-fluoroguanosine-3'-phosphate
  modified_base 8: mod_base = OTHER; note = 2'-O-methyluridine-3'-phosphate
  modified_base 9: mod_base = OTHER; note = 2'-fluorouridine-3'-phosphate
  modified_base 10: mod_base = OTHER; note = 2'-fluorouridine-3'-phosphate
  modified_base 11: mod_base = OTHER; note = 2'-fluoroguanosine-3'-phosphate
  modified_base 12: mod_base = OTHER; note = 2'-O-methyluridine-3'-phosphate
  modified_base 13: mod_base = OTHER; note = 2'-fluoroguanosine-3'-phosphate
  modified_base 14: mod_base = OTHER; note = 2'-O-methyladenosine-3'-phosphate
  modified_base 15: mod_base = OTHER; note = 2'-fluoroadenosine-3'-phosphate
  modified_base 16: mod_base = OTHER; note = 2'-O-methyladenosine-3'-phosphate
  modified_base 17: mod_base = OTHER; note = 2'-fluorocytidine-3'-phosphate
  modified_base 18: mod_base = OTHER; note = 2'-O-methyladenosine-3'-phosphate
  modified_base 19: mod_base = OTHER; note = 2'-fluoroadenosine-3'-phosphate
  modified_base 20: mod_base = OTHER; note = 2'-O-methyladenosine-3'-phosphate
  modified_base 21: mod_base = OTHER; note = 2'-fluoroadenosine-3'-phosphate N-[tris(GalNAc-alkyl)-amidodecanoyl)]-4-hydroxyprolinol Hyp-(GalNAc-alkyl)3
cagcttgtttgtgaaacaaaa

SEQ ID NO: 556 - RNA, 21 nt, synthetic construct
  source 1..21: mol_type = other RNA; note = Description of Artificial Sequence: Synthetic oligonucleotide
  modified_base 1: mod_base = OTHER; note = 2'-fluoroadenosine-3'-phosphorothioate
  modified_base 2: mod_base = OTHER; note = 2'-O-methylguanosine-3'- phosphorothioate
  modified_base 3: mod_base = OTHER; note = 2'-fluoroadenosine-3'-phosphate
  modified_base 4: mod_base = OTHER; note = 2'-O-methyladenosine-3'-phosphate
  modified_base 5: mod_base = OTHER; note = 2'-fluorocytidine-3'-phosphate
  modified_base 6: mod_base = OTHER; note = 2'-O-methyladenosine-3'-phosphate
  modified_base 7: mod_base = OTHER; note = 2'-fluoroadenosine-3'-phosphate
  modified_base 8: mod_base = OTHER; note = 2'-O-methyladenosine-3'-phosphate
  modified_base 9: mod_base = OTHER; note = 2'-fluoroadenosine-3'-phosphate
  modified_base 10: mod_base = OTHER; note = 2'-fluoroadenosine-3'-phosphate
  modified_base 11: mod_base = OTHER; note = 2'-fluorouridine-3'-phosphate
  modified_base 12: mod_base = OTHER; note = 2'-O-methyluridine-3'-phosphate
  modified_base 13: mod_base = OTHER; note = 2'-fluoroguanosine-3'-phosphate
  modified_base 14: mod_base = OTHER; note = 2'-O-methylguanosine-3'-phosphate
  modified_base 15: mod_base = OTHER; note = 2'-fluoroguanosine-3'-phosphate
  modified_base 16: mod_base = OTHER; note = 2'-O-methyluridine-3'-phosphate
  modified_base 17: mod_base = OTHER; note = 2'-fluorouridine-3'-phosphate
  modified_base 18: mod_base = OTHER; note = 2'-O-methyluridine-3'-phosphate
  modified_base 19: mod_base = OTHER; note = 2'-fluorouridine-3'-phosphate
  modified_base 20: mod_base = OTHER; note = 2'-O-methyladenosine-3'-phosphate
  modified_base 21: mod_base = OTHER; note = 2'-fluoroadenosine-3'-phosphate N-[tris(GalNAc-alkyl)-amidodecanoyl)]-4-hydroxyprolinol Hyp-(GalNAc-alkyl)3
agaacaaaaattgggttttaa

SEQ ID NO: 557 - RNA, 21 nt, synthetic construct
  source 1..21: mol_type = other RNA; note = Description of Artificial Sequence: Synthetic oligonucleotide
  modified_base 1: mod_base = OTHER; note = 2'-fluorouridine -3'-phosphorothioate
  modified_base 2: mod_base = OTHER; note = 2'-O-methylcytidine-3'- phosphorothioate
  modified_base 3: mod_base = OTHER; note = 2'-fluorocytidine-3'-phosphate
  modified_base 4: mod_base = OTHER; note = 2'-O-methyladenosine-3'-phosphate
  modified_base 5: mod_base = OTHER; note = 2'-fluoroguanosine-3'-phosphate
  modified_base 6: mod_base = OTHER; note = 2'-O-methylcytidine-3'-phosphate
  modified_base 7: mod_base = OTHER; note = 2'-fluoroadenosine-3'-phosphate
  modified_base 8: mod_base = OTHER; note = 2'-O-methyladenosine-3'-phosphate
  modified_base 9: mod_base = OTHER; note = 2'-fluoroadenosine-3'-phosphate
  modified_base 10: mod_base = OTHER; note = 2'-fluoroadenosine-3'-phosphate
  modified_base 11: mod_base = OTHER; note = 2'-fluorocytidine-3'-phosphate
  modified_base 12: mod_base = OTHER; note = 2'-O-methyluridine-3'-phosphate
  modified_base 13: mod_base = OTHER; note = 2'-fluorocytidine-3'-phosphate
  modified_base 14: mod_base = OTHER; note = 2'-O-methylcytidine-3'-phosphate
  modified_base 15: mod_base = OTHER; note = 2'-fluorocytidine-3'-phosphate
  modified_base 16: mod_base = OTHER; note = 2'-O-methyluridine-3'-phosphate
  modified_base 17: mod_base = OTHER; note = 2'-fluorocytidine-3'-phosphate
  modified_base 18: mod_base = OTHER; note = 2'-O-methyladenosine-3'-phosphate
  modified_base 19: mod_base = OTHER; note = 2'-fluoroadenosine-3'-phosphate
  modified_base 20: mod_base = OTHER; note = 2'-O-methylcytidine-3'-phosphate
  modified_base 21: mod_base = OTHER; note = 2'-fluorouridine-3'-phosphate N-[tris(GalNAc-alkyl)-amidodecanoyl)]-4-hydroxyprolinol Hyp-(GalNAc-alkyl)3
tccagcaaaactccctcaact

SEQ ID NO: 558 - RNA, 21 nt, synthetic construct
  source 1..21: mol_type = other RNA; note = Description of Artificial Sequence: Synthetic oligonucleotide
  modified_base 1: mod_base = OTHER; note = 2'-fluoroadenosine-3'-phosphorothioate
  modified_base 2: mod_base = OTHER; note = 2'-O-methylcytidine-3'- phosphorothioate
  modified_base 3: mod_base = OTHER; note = 2'-fluorouridine-3'-phosphate
  modified_base 4: mod_base = OTHER; note = 2'-O-methylcytidine-3'-phosphate
  modified_base 5: mod_base = OTHER; note = 2'-fluorocytidine-3'-phosphate
  modified_base 6: mod_base = OTHER; note = 2'-O-methylcytidine-3'-phosphate
  modified_base 7: mod_base = OTHER; note = 2'-fluorouridine-3'-phosphate
  modified_base 8: mod_base = OTHER; note = 2'-O-methylcytidine-3'-phosphate
  modified_base 9: mod_base = OTHER; note = 2'-fluoroadenosine-3'-phosphate
  modified_base 10: mod_base = OTHER; note = 2'-fluoroadenosine-3'-phosphate
  modified_base 11: mod_base = OTHER; note = 2'-fluorocytidine-3'-phosphate
  modified_base 12: mod_base = OTHER; note = 2'-O-methyluridine-3'-phosphate
  modified_base 13: mod_base = OTHER; note = 2'-fluoroguanosine-3'-phosphate
  modified_base 14: mod_base = OTHER; note = 2'-O-methylguanosine-3'-phosphate
  modified_base 15: mod_base = OTHER; note = 2'-fluoroadenosine-3'-phosphate
  modified_base 16: mod_base = OTHER; note = 2'-O-methyluridine-3'-phosphate
  modified_base 17: mod_base = OTHER; note = 2'-fluoroguanosine-3'-phosphate
  modified_base 18: mod_base = OTHER; note = 2'-O-methyladenosine-3'-phosphate
  modified_base 19: mod_base = OTHER; note = 2'-fluoroadenosine-3'-phosphate
  modified_base 20: mod_base = OTHER; note = 2'-O-methylguanosine-3'-phosphate
  modified_base 21: mod_base = OTHER; note = 2'-fluoroadenosine-3'-phosphate N-[tris(GalNAc-alkyl)-amidodecanoyl)]-4-hydroxyprolinol Hyp-(GalNAc-alkyl)3
actccctcaactggatgaaga

SEQ ID NO: 559 - RNA, 21 nt, synthetic construct
  source 1..21: mol_type = other RNA; note = Description of Artificial Sequence: Synthetic oligonucleotide
  modified_base 1: mod_base = OTHER; note = 2'-fluoroguanosine-3'-phosphorothioate
  modified_base 2: mod_base = OTHER; note = 2'-O-methyluridine-3'-phosphorothioate
  modified_base 3: mod_base = OTHER; note = 2'-fluorocytidine-3'-phosphate
  modified_base 4: mod_base = OTHER; note = 2'-O-methyluridine-3'-phosphate
  modified_base 5: mod_base = OTHER; note = 2'-fluorouridine-3'-phosphate
  modified_base 6: mod_base = OTHER; note = 2'-O-methylguanosine-3'-phosphate
  modified_base 7: mod_base = OTHER; note = 2'-fluoroadenosine-3'-phosphate
  modified_base 8: mod_base = OTHER; note = 2'-O-methyladenosine-3'-phosphate
  modified_base 9: mod_base = OTHER; note = 2'-fluorouridine-3'-phosphate
  modified_base 10: mod_base = OTHER; note = 2'-fluoroguanosine-3'-phosphate
  modified_base 11: mod_base = OTHER; note = 2'-fluorouridine-3'-phosphate
  modified_base 12: mod_base = OTHER; note = 2'-O-methyladenosine-3'-phosphate
  modified_base 13: mod_base = OTHER; note = 2'-fluoroadenosine-3'-phosphate
  modified_base 14: mod_base = OTHER; note = 2'-O-methylguanosine-3'-phosphate
  modified_base 15: mod_base = OTHER; note = 2'-fluoroadenosine-3'-phosphate
  modified_base 16: mod_base = OTHER; note = 2'-O-methyladenosine-3'-phosphate
  modified_base 17: mod_base = OTHER; note = 2'-fluorocytidine-3'-phosphate
  modified_base 18: mod_base = OTHER; note = 2'-O-methyladenosine-3'-phosphate
  modified_base 19: mod_base = OTHER; note = 2'-fluorouridine-3'-phosphate
  modified_base 20: mod_base = OTHER; note = 2'-O-methylguanosine-3'-phosphate
  modified_base 21: mod_base = OTHER; note = 2'-fluoroadenosine-3'-phosphate N-[tris(GalNAc-alkyl)-amidodecanoyl)]-4-hydroxyprolinol Hyp-(GalNAc-alkyl)3
gtcttgaatgtaagaacatga

SEQ ID NO: 560 - RNA, 21 nt, synthetic construct
  source 1..21: mol_type = other RNA; note = Description of Artificial Sequence: Synthetic oligonucleotide
  modified_base 1: mod_base = OTHER; note = 2'-fluoroadenosine-3'-phosphorothioate
  modified_base 2: mod_base = OTHER; note = 2'-O-methyladenosine-3'- phosphorothioate
  modified_base 3: mod_base = OTHER; note = 2'-fluorocytidine-3'-phosphate
  modified_base 4: mod_base = OTHER; note = 2'-O-methyluridine-3'-phosphate
  modified_base 5: mod_base = OTHER; note = 2'-fluorouridine-3'-phosphate
  modified_base 6: mod_base = OTHER; note = 2'-O-methylcytidine-3'-phosphate
  modified_base 7: mod_base = OTHER; note = 2'-fluorouridine-3'-phosphate
  modified_base 8: mod_base = OTHER; note = 2'-O-methyluridine-3'-phosphate
  modified_base 9: mod_base = OTHER; note = 2'-fluoroguanosine-3'-phosphate
  modified_base 10: mod_base = OTHER; note = 2'-fluoroguanosine-3'-phosphate
  modified_base 11: mod_base = OTHER; note = 2'-fluoroguanosine-3'-phosphate
  modified_base 12: mod_base = OTHER; note = 2'-O-methylcytidine-3'-phosphate
  modified_base 13: mod_base = OTHER; note = 2'-fluorouridine-3'-phosphate
  modified_base 14: mod_base = OTHER; note = 2'-O-methyluridine-3'-phosphate
  modified_base 15: mod_base = OTHER; note = 2'-fluorocytidine-3'-phosphate
  modified_base 16: mod_base = OTHER; note = 2'-O-methylcytidine-3'-phosphate
  modified_base 17: mod_base = OTHER; note = 2'-fluoroguanosine-3'-phosphate
  modified_base 18: mod_base = OTHER; note = 2'-O-methyluridine-3'-phosphate
  modified_base 19: mod_base = OTHER; note = 2'-fluoroadenosine-3'-phosphate
  modified_base 20: mod_base = OTHER; note = 2'-O-methyluridine-3'-phosphate
  modified_base 21: mod_base = OTHER; note = 2'-fluoroadenosine-3'-phosphate N-[tris(GalNAc-alkyl)-amidodecanoyl)]-4-hydroxyprolinol Hyp-(GalNAc-alkyl)3
aacttcttgggcttccgtata

SEQ ID NO: 561 - RNA, 21 nt, synthetic construct
  source 1..21: mol_type = other RNA; note = Description of Artificial Sequence: Synthetic oligonucleotide
  modified_base 1: mod_base = OTHER; note = 2'-fluoroadenosine-3'-phosphorothioate
  modified_base 2: mod_base = OTHER; note = 2'-O-methyladenosine-3'- phosphorothioate
  modified_base 3: mod_base = OTHER; note = 2'-fluoroadenosine-3'-phosphate
  modified_base 4: mod_base = OTHER; note = 2'-O-methyladenosine-3'-phosphate
  modified_base 5: mod_base = OTHER; note = 2'-fluoroadenosine-3'-phosphate
  modified_base 6: mod_base = OTHER; note = 2'-O-methyladenosine-3'-phosphate
  modified_base 7: mod_base = OTHER; note = 2'-fluoroguanosine-3'-phosphate
  modified_base 8: mod_base = OTHER; note = 2'-O-methyluridine-3'-phosphate
  modified_base 9: mod_base = OTHER; note = 2'-fluoroguanosine-3'-phosphate
  modified_base 10: mod_base = OTHER; note = 2'-fluorouridine-3'-phosphate
  modified_base 11: mod_base = OTHER; note = 2'-fluorouridine-3'-phosphate
  modified_base 12: mod_base = OTHER; note = 2'-O-methylcytidine-3'-phosphate
  modified_base 13: mod_base = OTHER; note = 2'-fluorocytidine-3'-phosphate
  modified_base 14: mod_base = OTHER; note = 2'-O-methylcytidine-3'-phosphate
  modified_base 15: mod_base = OTHER; note = 2'-fluorouridine-3'-phosphate
  modified_base 16: mod_base = OTHER; note = 2'-O-methyluridine-3'-phosphate
  modified_base 17: mod_base = OTHER; note = 2'-fluorouridine-3'-phosphate
  modified_base 18: mod_base = OTHER; note = 2'-O-methyluridine-3'-phosphate
  modified_base 19: mod_base = OTHER; note = 2'-fluorocytidine-3'-phosphate
  modified_base 20: mod_base = OTHER; note = 2'-O-methyladenosine-3'-phosphate
  modified_base 21: mod_base = OTHER; note = 2'-fluoroadenosine-3'-phosphate N-[tris(GalNAc-alkyl)-amidodecanoyl)]-4-hydroxyprolinol Hyp-(GalNAc-alkyl)3
aaaaaagtgttcccttttcaa

SEQ ID NO: 562 - RNA, 21 nt, synthetic construct
  source 1..21: mol_type = other RNA; note = Description of Artificial Sequence: Synthetic oligonucleotide
  modified_base 1: mod_base = OTHER; note = 2'-fluorocytidine-3'-phosphorothioate
  modified_base 2: mod_base = OTHER; note = 2'-O-methylcytidine-3'- phosphorothioate
  modified_base 3: mod_base = OTHER; note = 2'-fluorocytidine-3'-phosphate
  modified_base 4: mod_base = OTHER; note = 2'-O-methyladenosine-3'-phosphate
  modified_base 5: mod_base = OTHER; note = 2'-fluorocytidine-3'-phosphate
  modified_base 6: mod_base = OTHER; note = 2'-O-methylcytidine-3'-phosphate
  modified_base 7: mod_base = OTHER; note = 2'-fluorouridine-3'-phosphate
  modified_base 8: mod_base = OTHER; note = 2'-O-methyluridine-3'-phosphate
  modified_base 9: mod_base = OTHER; note = 2'-fluorouridine-3'-phosphate
  modified_base 10: mod_base = OTHER; note = 2'-fluorouridine-3'-phosphate
  modified_base 11: mod_base = OTHER; note = 2'-fluorocytidine-3'-phosphate
  modified_base 12: mod_base = OTHER; note = 2'-O-methyluridine-3'-phosphate
  modified_base 13: mod_base = OTHER; note = 2'-fluorouridine-3'-phosphate
  modified_base 14: mod_base = OTHER; note = 2'-O-methylcytidine-3'-phosphate
  modified_base 15: mod_base = OTHER; note = 2'-fluorouridine-3'-phosphate
  modified_base 16: mod_base = OTHER; note = 2'-O-methyladenosine-3'-phosphate
  modified_base 17: mod_base = OTHER; note = 2'-fluoroadenosine-3'-phosphate
  modified_base 18: mod_base = OTHER; note = 2'-O-methyluridine-3'-phosphate
  modified_base 19: mod_base = OTHER; note = 2'-fluoroguanosine-3'-phosphate
  modified_base 20: mod_base = OTHER; note = 2'-O-methyladenosine-3'-phosphate
  modified_base 21: mod_base = OTHER; note = 2'-fluoroadenosine-3'-phosphate N-[tris(GalNAc-alkyl)-amidodecanoyl)]-4-hydroxyprolinol Hyp-(GalNAc-alkyl)3
cccaccttttcttctaatgaa

SEQ ID NO: 563 - RNA, 21 nt, synthetic construct
  source 1..21: mol_type = other RNA; note = Description of Artificial Sequence: Synthetic oligonucleotide
  modified_base 1: mod_base = OTHER; note = 2'-fluoroguanosine-3'-phosphorothioate
  modified_base 2: mod_base = OTHER; note = 2'-O-methyladenosine-3'- phosphorothioate
  modified_base 3: mod_base = OTHER; note = 2'-fluorocytidine-3'-phosphate
  modified_base 4: mod_base = OTHER; note = 2'-O-methyladenosine-3'-phosphate
  modified_base 5: mod_base = OTHER; note = 2'-fluoroadenosine-3'-phosphate
  modified_base 6: mod_base = OTHER; note = 2'-O-methylguanosine-3'-phosphate
  modified_base 7: mod_base = OTHER; note = 2'-fluoroguanosine-3'-phosphate
  modified_base 8: mod_base = OTHER; note = 2'-O-methyluridine-3'-phosphate
  modified_base 9: mod_base = OTHER; note = 2'-fluoroguanosine-3'-phosphate
  modified_base 10: mod_base = OTHER; note = 2'-fluoroguanosine-3'-phosphate
  modified_base 11: mod_base = OTHER; note = 2'-fluoroadenosine-3'-phosphate
  modified_base 12: mod_base = OTHER; note = 2'-O-methylguanosine-3'-phosphate
  modified_base 13: mod_base = OTHER; note = 2'-fluoroguanosine-3'-phosphate
  modified_base 14: mod_base = OTHER; note = 2'-O-methylguanosine-3'-phosphate
  modified_base 15: mod_base = OTHER; note = 2'-fluorouridine-3'-phosphate
  modified_base 16: mod_base = OTHER; note = 2'-O-methylcytidine-3'-phosphate
  modified_base 17: mod_base = OTHER; note = 2'-fluorouridine-3'-phosphate
  modified_base 18: mod_base = OTHER; note = 2'-O-methylcytidine-3'-phosphate
  modified_base 19: mod_base = OTHER; note = 2'-fluoroadenosine-3'-phosphate
  modified_base 20: mod_base = OTHER; note = 2'-O-methylcytidine-3'-phosphate
  modified_base 21: mod_base = OTHER; note = 2'-fluorouridine-3'-phosphate N-[tris(GalNAc-alkyl)-amidodecanoyl)]-4-hydroxyprolinol Hyp-(GalNAc-alkyl)3
gacaaggtggagggtctcact

SEQ ID NO: 564 - RNA, 21 nt, synthetic construct
  source 1..21: mol_type = other RNA; note = Description of Artificial Sequence: Synthetic oligonucleotide
  modified_base 1: mod_base = OTHER; note = 2'-fluorouridine -3'-phosphorothioate
  modified_base 2: mod_base = OTHER; note = 2'-O-methyluridine-3'-phosphorothioate
  modified_base 3: mod_base = OTHER; note = 2'-fluorocytidine-3'-phosphate
  modified_base 4: mod_base = OTHER; note = 2'-O-methylcytidine-3'-phosphate
  modified_base 5: mod_base = OTHER; note = 2'-fluoroguanosine-3'-phosphate
  modified_base 6: mod_base = OTHER; note = 2'-O-methyluridine-3'-phosphate
  modified_base 7: mod_base = OTHER; note = 2'-fluoroadenosine-3'-phosphate
  modified_base 8: mod_base = OTHER; note = 2'-O-methyluridine-3'-phosphate
  modified_base 9: mod_base = OTHER; note = 2'-fluoroadenosine-3'-phosphate
  modified_base 10: mod_base = OTHER; note = 2'-fluorouridine-3'-phosphate
  modified_base 11: mod_base = OTHER; note = 2'-fluoroadenosine-3'-phosphate
  modified_base 12: mod_base = OTHER; note = 2'-O-methyluridine-3'-phosphate
  modified_base 13: mod_base = OTHER; note = 2'-fluoroguanosine-3'-phosphate
  modified_base 14: mod_base = OTHER; note = 2'-O-methylguanosine-3'-phosphate
  modified_base 15: mod_base = OTHER; note = 2'-fluorocytidine-3'-phosphate
  modified_base 16: mod_base = OTHER; note = 2'-O-methyladenosine-3'-phosphate
  modified_base 17: mod_base = OTHER; note = 2'-fluorouridine-3'-phosphate
  modified_base 18: mod_base = OTHER; note = 2'-O-methylguanosine-3'-phosphate
  modified_base 19: mod_base = OTHER; note = 2'-fluorocytidine-3'-phosphate
  modified_base 20: mod_base = OTHER; note = 2'-O-methyladenosine-3'-phosphate
  modified_base 21: mod_base = OTHER; note = 2'-fluoroadenosine-3'-phosphate N-[tris(GalNAc-alkyl)-amidodecanoyl)]-4-hydroxyprolinol Hyp-(GalNAc-alkyl)3
ttccgtatatatggcatgcaa

SEQ ID NO: 565 - RNA, 21 nt, synthetic construct
  source 1..21: mol_type = other RNA; note = Description of Artificial Sequence: Synthetic oligonucleotide
  modified_base 1: mod_base = OTHER; note = 2'-fluoroguanosine-3'-phosphorothioate
  modified_base 2: mod_base = OTHER; note = 2'-O-methyladenosine-3'- phosphorothioate
  modified_base 3: mod_base = OTHER; note = 2'-fluoroadenosine-3'-phosphate
  modified_base 4: mod_base = OTHER; note = 2'-O-methylcytidine-3'-phosphate
  modified_base 5: mod_base = OTHER; note = 2'-fluoroadenosine-3'-phosphate
  modified_base 6: mod_base = OTHER; note = 2'-O-methyladenosine-3'-phosphate
  modified_base 7: mod_base = OTHER; note = 2'-fluoroadenosine-3'-phosphate
  modified_base 8: mod_base = OTHER; note = 2'-O-methyladenosine-3'-phosphate
  modified_base 9: mod_base = OTHER; note = 2'-fluoroadenosine-3'-phosphate
  modified_base 10: mod_base = OTHER; note = 2'-fluorouridine-3'-phosphate
  modified_base 11: mod_base = OTHER; note = 2'-fluorouridine-3'-phosphate
  modified_base 12: mod_base = OTHER; note = 2'-O-methylguanosine-3'-phosphate
  modified_base 13: mod_base = OTHER; note = 2'-fluoroguanosine-3'-phosphate
  modified_base 14: mod_base = OTHER; note = 2'-O-methylguanosine-3'-phosphate
  modified_base 15: mod_base = OTHER; note = 2'-fluorouridine-3'-phosphate
  modified_base 16: mod_base = OTHER; note = 2'-O-methyluridine-3'-phosphate
  modified_base 17: mod_base = OTHER; note = 2'-fluorouridine-3'-phosphate
  modified_base 18: mod_base = OTHER; note = 2'-O-methyluridine-3'-phosphate
  modified_base 19: mod_base = OTHER; note = 2'-fluoroadenosine-3'-phosphate
  modified_base 20: mod_base = OTHER; note = 2'-O-methyladenosine-3'-phosphate
  modified_base 21: mod_base = OTHER; note = 2'-fluoroadenosine-3'-phosphate N-[tris(GalNAc-alkyl)-amidodecanoyl)]-4-hydroxyprolinol Hyp-(GalNAc-alkyl)3
gaacaaaaattgggttttaaa

SEQ ID NO: 566 - RNA, 21 nt, synthetic construct
  source 1..21: mol_type = other RNA; note = Description of Artificial Sequence: Synthetic oligonucleotide
  modified_base 1: mod_base = OTHER; note = 2'-fluorouridine -3'-phosphorothioate
  modified_base 2: mod_base = OTHER; note = 2'-O-methylguanosine-3'- phosphorothioate
  modified_base 3: mod_base = OTHER; note = 2'-fluorouridine-3'-phosphate
  modified_base 4: mod_base = OTHER; note = 2'-O-methyluridine-3'-phosphate
  modified_base 5: mod_base = OTHER; note = 2'-fluorouridine-3'-phosphate
  modified_base 6: mod_base = OTHER; note = 2'-O-methylguanosine-3'-phosphate
  modified_base 7: mod_base = OTHER; note = 2'-fluorocytidine-3'-phosphate
  modified_base 8: mod_base = OTHER; note = 2'-O-methyluridine-3'-phosphate
  modified_base 9: mod_base = OTHER; note = 2'-fluoroguanosine-3'-phosphate
  modified_base 10: mod_base = OTHER; note = 2'-fluorouridine-3'-phosphate
  modified_base 11: mod_base = OTHER; note = 2'-fluoroguanosine-3'-phosphate
  modified_base 12: mod_base = OTHER; note = 2'-O-methyluridine-3'-phosphate
  modified_base 13: mod_base = OTHER; note = 2'-fluoroadenosine-3'-phosphate
  modified_base 14: mod_base = OTHER; note = 2'-O-methyluridine-3'-phosphate
  modified_base 15: mod_base = OTHER; note = 2'-fluoroguanosine-3'-phosphate
  modified_base 16: mod_base = OTHER; note = 2'-O-methyladenosine-3'-phosphate
  modified_base 17: mod_base = OTHER; note = 2'-fluorouridine-3'-phosphate
  modified_base 18: mod_base = OTHER; note = 2'-O-methylcytidine-3'-phosphate
  modified_base 19: mod_base = OTHER; note = 2'-fluoroadenosine-3'-phosphate
  modified_base 20: mod_base = OTHER; note = 2'-O-methyladenosine-3'-phosphate
  modified_base 21: mod_base = OTHER; note = 2'-fluoroadenosine-3'-phosphate N-[tris(GalNAc-alkyl)-amidodecanoyl)]-4-hydroxyprolinol Hyp-(GalNAc-alkyl)3
tgtttgctgtgtatgatcaaa

SEQ ID NO: 567 - RNA, 21 nt, synthetic construct
  source 1..21: mol_type = other RNA; note = Description of Artificial Sequence: Synthetic oligonucleotide
  modified_base 1: mod_base = OTHER; note = 2'-fluorocytidine-3'-phosphorothioate
  modified_base 2: mod_base = OTHER; note = 2'-O-methyluridine-3'-phosphorothioate
  modified_base 3: mod_base = OTHER; note = 2'-fluoroguanosine-3'-phosphate
  modified_base 4: mod_base = OTHER; note = 2'-O-methyladenosine-3'-phosphate
  modified_base 5: mod_base = OTHER; note = 2'-fluoroadenosine-3'-phosphate
  modified_base 6: mod_base = OTHER; note = 2'-O-methylcytidine-3'-phosphate
  modified_base 7: mod_base = OTHER; note = 2'-fluorocytidine-3'-phosphate
  modified_base 8: mod_base = OTHER; note = 2'-O-methyluridine-3'-phosphate
  modified_base 9: mod_base = OTHER; note = 2'-fluoroguanosine-3'-phosphate
  modified_base 10: mod_base = OTHER; note = 2'-fluorocytidine-3'-phosphate
  modified_base 11: mod_base = OTHER; note = 2'-fluoroadenosine-3'-phosphate
  modified_base 12: mod_base = OTHER; note = 2'-O-methyladenosine-3'-phosphate
  modified_base 13: mod_base = OTHER; note = 2'-fluoroadenosine-3'-phosphate
  modified_base 14: mod_base = OTHER; note = 2'-O-methyladenosine-3'-phosphate
  modified_base 15: mod_base = OTHER; note = 2'-fluoroadenosine-3'-phosphate
  modified_base 16: mod_base = OTHER; note = 2'-O-methyluridine-3'-phosphate
  modified_base 17: mod_base = OTHER; note = 2'-fluorouridine-3'-phosphate
  modified_base 18: mod_base = OTHER; note = 2'-O-methylguanosine-3'-phosphate
  modified_base 19: mod_base = OTHER; note = 2'-fluoroadenosine-3'-phosphate
  modified_base 20: mod_base = OTHER; note = 2'-O-methylguanosine-3'-phosphate
  modified_base 21: mod_base = OTHER; note = 2'-fluoroadenosine-3'-phosphate N-[tris(GalNAc-alkyl)-amidodecanoyl)]-4-hydroxyprolinol Hyp-(GalNAc-alkyl)3
ctgaacctgcaaaaattgaga

SEQ ID NO: 568 - RNA, 21 nt, synthetic construct
  source 1..21: mol_type = other RNA; note = Description of Artificial Sequence: Synthetic oligonucleotide
  modified_base 1: mod_base = OTHER; note = 2'-fluorouridine -3'-phosphorothioate
  modified_base 2: mod_base = OTHER; note = 2'-O-methyluridine-3'-phosphorothioate
  modified_base 3: mod_base = OTHER; note = 2'-fluorocytidine-3'-phosphate
  modified_base 4: mod_base = OTHER; note = 2'-O-methylcytidine-3'-phosphate
  modified_base 5: mod_base = OTHER; note = 2'-fluoroadenosine-3'-phosphate
  modified_base 6: mod_base = OTHER; note = 2'-O-methyladenosine-3'-phosphate
  modified_base 7: mod_base = OTHER; note = 2'-fluorocytidine-3'-phosphate
  modified_base 8: mod_base = OTHER; note = 2'-O-methylcytidine-3'-phosphate
  modified_base 9: mod_base = OTHER; note = 2'-fluoroguanosine-3'-phosphate
  modified_base 10: mod_base = OTHER; note = 2'-fluoroadenosine-3'-phosphate
  modified_base 11: mod_base = OTHER; note = 2'-fluorocytidine-3'-phosphate
  modified_base 12: mod_base = OTHER; note = 2'-O-methylcytidine-3'-phosphate
  modified_base 13: mod_base = OTHER; note = 2'-fluoroadenosine-3'-phosphate
  modified_base 14: mod_base = OTHER; note = 2'-O-methylguanosine-3'-phosphate
  modified_base 15: mod_base = OTHER; note = 2'-fluorocytidine-3'-phosphate
  modified_base 16: mod_base = OTHER; note = 2'-O-methyluridine-3'-phosphate
  modified_base 17: mod_base = OTHER; note = 2'-fluorouridine-3'-phosphate
  modified_base 18: mod_base = OTHER; note = 2'-O-methylguanosine-3'-phosphate
  modified_base 19: mod_base = OTHER; note = 2'-fluorouridine-3'-phosphate
  modified_base 20: mod_base = OTHER; note = 2'-O-methyluridine-3'-phosphate
  modified_base 21: mod_base = OTHER; note = 2'-fluorouridine-3'-phosphate N-[tris(GalNAc-alkyl)-amidodecanoyl)]-4-hydroxyprolinol Hyp-(GalNAc-alkyl)3
ttccaaccgaccagcttgttt

SEQ ID NO: 569 - RNA, 21 nt, synthetic construct
  source 1..21: mol_type = other RNA; note = Description of Artificial Sequence: Synthetic oligonucleotide
  modified_base 1: mod_base = OTHER; note = 2'-fluorouridine -3'-phosphorothioate
  modified_base 2: mod_base = OTHER; note = 2'-O-methylcytidine-3'- phosphorothioate
  modified_base 3: mod_base = OTHER; note = 2'-fluorouridine-3'-phosphate
  modified_base 4: mod_base = OTHER; note = 2'-O-methylcytidine-3'-phosphate
  modified_base 5: mod_base = OTHER; note = 2'-fluorocytidine-3'-phosphate
  modified_base 6: mod_base = OTHER; note = 2'-O-methylcytidine-3'-phosphate
  modified_base 7: mod_base = OTHER; note = 2'-fluoroadenosine-3'-phosphate
  modified_base 8: mod_base = OTHER; note = 2'-O-methylcytidine-3'-phosphate
  modified_base 9: mod_base = OTHER; note = 2'-fluorocytidine-3'-phosphate
  modified_base 10: mod_base = OTHER; note = 2'-fluorouridine-3'-phosphate
  modified_base 11: mod_base = OTHER; note = 2'-fluorouridine-3'-phosphate
  modified_base 12: mod_base = OTHER; note = 2'-O-methyluridine-3'-phosphate
  modified_base 13: mod_base = OTHER; note = 2'-fluorouridine-3'-phosphate
  modified_base 14: mod_base = OTHER; note = 2'-O-methylcytidine-3'-phosphate
  modified_base 15: mod_base = OTHER; note = 2'-fluorouridine-3'-phosphate
  modified_base 16: mod_base = OTHER; note = 2'-O-methyluridine-3'-phosphate
  modified_base 17: mod_base = OTHER; note = 2'-fluorocytidine-3'-phosphate
  modified_base 18: mod_base = OTHER; note = 2'-O-methyluridine-3'-phosphate
  modified_base 19: mod_base = OTHER; note = 2'-fluoroadenosine-3'-phosphate
  modified_base 20: mod_base = OTHER; note = 2'-O-methyladenosine-3'-phosphate
  modified_base 21: mod_base = OTHER; note = 2'-fluorouridine-3'-phosphate N-[tris(GalNAc-alkyl)-amidodecanoyl)]-4-hydroxyprolinol Hyp-(GalNAc-alkyl)3
tctcccaccttttcttctaat

SEQ ID NO: 570 - RNA, 21 nt, synthetic construct
  source 1..21: mol_type = other RNA; note = Description of Artificial Sequence: Synthetic oligonucleotide
  modified_base 1: mod_base = OTHER; note = 2'-fluoroadenosine-3'-phosphorothioate
  modified_base 2: mod_base = OTHER; note = 2'-O-methylcytidine-3'- phosphorothioate
  modified_base 3: mod_base = OTHER; note = 2'-fluorocytidine-3'-phosphate
  modified_base 4: mod_base = OTHER; note = 2'-O-methyluridine-3'-phosphate
  modified_base 5: mod_base = OTHER; note = 2'-fluoroguanosine-3'-phosphate
  modified_base 6: mod_base = OTHER; note = 2'-O-methylcytidine-3'-phosphate
  modified_base 7: mod_base = OTHER; note = 2'-fluoroadenosine-3'-phosphate
  modified_base 8: mod_base = OTHER; note = 2'-O-methyladenosine-3'-phosphate
  modified_base 9: mod_base = OTHER; note = 2'-fluoroadenosine-3'-phosphate
  modified_base 10: mod_base = OTHER; note = 2'-fluoroadenosine-3'-phosphate
  modified_base 11: mod_base = OTHER; note = 2'-fluoroadenosine-3'-phosphate
  modified_base 12: mod_base = OTHER; note = 2'-O-methyluridine-3'-phosphate
  modified_base 13: mod_base = OTHER; note = 2'-fluorouridine-3'-phosphate
  modified_base 14: mod_base = OTHER; note = 2'-O-methylguanosine-3'-phosphate
  modified_base 15: mod_base = OTHER; note = 2'-fluoroadenosine-3'-phosphate
  modified_base 16: mod_base = OTHER; note = 2'-O-methylguanosine-3'-phosphate
  modified_base 17: mod_base = OTHER; note = 2'-fluorocytidine-3'-phosphate
  modified_base 18: mod_base = OTHER; note = 2'-O-methyladenosine-3'-phosphate
  modified_base 19: mod_base = OTHER; note = 2'-fluoroadenosine-3'-phosphate
  modified_base 20: mod_base = OTHER; note = 2'-O-methyluridine-3'-phosphate
  modified_base 21: mod_base = OTHER; note = 2'-fluoroadenosine-3'-phosphate N-[tris(GalNAc-alkyl)-amidodecanoyl)]-4-hydroxyprolinol Hyp-(GalNAc-alkyl)3
acctgcaaaaattgagcaata

SEQ ID NO: 571 - RNA, 21 nt, synthetic construct
  source 1..21: mol_type = other RNA; note = Description of Artificial Sequence: Synthetic oligonucleotide
  modified_base 1: mod_base = OTHER; note = 2'-fluoroguanosine-3'-phosphorothioate
  modified_base 2: mod_base = OTHER; note = 2'-O-methyluridine-3'-phosphorothioate
  modified_base 3: mod_base = OTHER; note = 2'-fluorouridine-3'-phosphate
  modified_base 4: mod_base = OTHER; note = 2'-O-methyluridine-3'-phosphate
  modified_base 5: mod_base = OTHER; note = 2'-fluoroguanosine-3'-phosphate
  modified_base 6: mod_base = OTHER; note = 2'-O-methyluridine-3'-phosphate
  modified_base 7: mod_base = OTHER; note = 2'-fluoroadenosine-3'-phosphate
  modified_base 8: mod_base = OTHER; note = 2'-O-methyluridine-3'-phosphate
  modified_base 9: mod_base = OTHER; note = 2'-fluorouridine-3'-phosphate
  modified_base 10: mod_base = OTHER; note = 2'-fluorouridine-3'-phosphate
  modified_base 11: mod_base = OTHER; note = 2'-fluoroadenosine-3'-phosphate
  modified_base 12: mod_base = OTHER; note = 2'-O-methylguanosine-3'-phosphate
  modified_base 13: mod_base = OTHER; note = 2'-fluorouridine-3'-phosphate
  modified_base 14: mod_base = OTHER; note = 2'-O-methylguanosine-3'-phosphate
  modified_base 15: mod_base = OTHER; note = 2'-fluorouridine-3'-phosphate
  modified_base 16: mod_base = OTHER; note = 2'-O-methylcytidine-3'-phosphate
  modified_base 17: mod_base = OTHER; note = 2'-fluorouridine-3'-phosphate
  modified_base 18: mod_base = OTHER; note = 2'-O-methyluridine-3'-phosphate
  modified_base 19: mod_base = OTHER; note = 2'-fluoroguanosine-3'-phosphate
  modified_base 20: mod_base = OTHER; note = 2'-O-methyladenosine-3'-phosphate
  modified_base 21: mod_base = OTHER; note = 2'-fluoroadenosine-3'-phosphate N-[tris(GalNAc-alkyl)-amidodecanoyl)]-4-hydroxyprolinol Hyp-(GalNAc-alkyl)3
gtttgtatttagtgtcttgaa

SEQ ID NO: 572 - RNA, 21 nt, synthetic construct
  source 1..21: mol_type = other RNA; note = Description of Artificial Sequence: Synthetic oligonucleotide
  modified_base 1: mod_base = OTHER; note = 2'-fluorocytidine-3'-phosphorothioate
  modified_base 2: mod_base = OTHER; note = 2'-O-methyluridine-3'-phosphorothioate
  modified_base 3: mod_base = OTHER; note = 2'-fluorocytidine-3'-phosphate
  modified_base 4: mod_base = OTHER; note = 2'-O-methyluridine-3'-phosphate
  modified_base 5: mod_base = OTHER; note = 2'-fluorocytidine-3'-phosphate
  modified_base 6: mod_base = OTHER; note = 2'-O-methylcytidine-3'-phosphate
  modified_base 7: mod_base = OTHER; note = 2'-fluorocytidine-3'-phosphate
  modified_base 8: mod_base = OTHER; note = 2'-O-methylcytidine-3'-phosphate
  modified_base 9: mod_base = OTHER; note = 2'-fluoroadenosine-3'-phosphate
  modified_base 10: mod_base = OTHER; note = 2'-fluoroadenosine-3'-phosphate
  modified_base 11: mod_base = OTHER; note = 2'-fluorocytidine-3'-phosphate
  modified_base 12: mod_base = OTHER; note = 2'-O-methylguanosine-3'-phosphate
  modified_base 13: mod_base = OTHER; note = 2'-fluoroguanosine-3'-phosphate
  modified_base 14: mod_base = OTHER; note = 2'-O-methylcytidine-3'-phosphate
  modified_base 15: mod_base = OTHER; note = 2'-fluorouridine-3'-phosphate
  modified_base 16: mod_base = OTHER; note = 2'-O-methylguanosine-3'-phosphate
  modified_base 17: mod_base = OTHER; note = 2'-fluorouridine-3'-phosphate
  modified_base 18: mod_base = OTHER; note = 2'-O-methylcytidine-3'-phosphate
  modified_base 19: mod_base = OTHER; note = 2'-fluorouridine-3'-phosphate
  modified_base 20: mod_base = OTHER; note = 2'-O-methyluridine-3'-phosphate
  modified_base 21: mod_base = OTHER; note = 2'-fluorouridine-3'-phosphate N-[tris(GalNAc-alkyl)-amidodecanoyl)]-4-hydroxyprolinol Hyp-(GalNAc-alkyl)3
ctctccccaacggctgtcttt

SEQ ID NO: 573 - RNA, 21 nt, synthetic construct
  source 1..21: mol_type = other RNA; note = Description of Artificial Sequence: Synthetic oligonucleotide
  modified_base 1: mod_base = OTHER; note = 2'-fluoroadenosine-3'-phosphorothioate
  modified_base 2: mod_base = OTHER; note = 2'-O-methylcytidine-3'- phosphorothioate
  modified_base 3: mod_base = OTHER; note = 2'-fluorocytidine-3'-phosphate
  modified_base 4: mod_base = OTHER; note = 2'-O-methylguanosine-3'-phosphate
  modified_base 5: mod_base = OTHER; note = 2'-fluoroadenosine-3'-phosphate
  modified_base 6: mod_base = OTHER; note = 2'-O-methylcytidine-3'-phosphate
  modified_base 7: mod_base = OTHER; note = 2'-fluorocytidine-3'-phosphate
  modified_base 8: mod_base = OTHER; note = 2'-O-methyladenosine-3'-phosphate
  modified_base 9: mod_base = OTHER; note = 2'-fluoroguanosine-3'-phosphate
  modified_base 10: mod_base = OTHER; note = 2'-fluorocytidine-3'-phosphate
  modified_base 11: mod_base = OTHER; note = 2'-fluorouridine-3'-phosphate
  modified_base 12: mod_base = OTHER; note = 2'-O-methyluridine-3'-phosphate
  modified_base 13: mod_base = OTHER; note = 2'-fluoroguanosine-3'-phosphate
  modified_base 14: mod_base = OTHER; note = 2'-O-methyluridine-3'-phosphate
  modified_base 15: mod_base = OTHER; note = 2'-fluorouridine-3'-phosphate
  modified_base 16: mod_base = OTHER; note = 2'-O-methyluridine-3'-phosphate
  modified_base 17: mod_base = OTHER; note = 2'-fluoroguanosine-3'-phosphate
  modified_base 18: mod_base = OTHER; note = 2'-O-methyluridine-3'-phosphate
  modified_base 19: mod_base = OTHER; note = 2'-fluoroguanosine-3'-phosphate
  modified_base 20: mod_base = OTHER; note = 2'-O-methyladenosine-3'-phosphate
  modified_base 21: mod_base = OTHER; note = 2'-fluoroadenosine-3'-phosphate N-[tris(GalNAc-alkyl)-amidodecanoyl)]-4-hydroxyprolinol Hyp-(GalNAc-alkyl)3
accgaccagcttgtttgtgaa

SEQ ID NO: 574 - RNA, 21 nt, synthetic construct
  source 1..21: mol_type = other RNA; note = Description of Artificial Sequence: Synthetic oligonucleotide
  modified_base 1: mod_base = OTHER; note = 2'-fluorocytidine-3'-phosphorothioate
  modified_base 2: mod_base = OTHER; note = 2'-O-methylcytidine-3'- phosphorothioate
  modified_base 3: mod_base = OTHER; note = 2'-fluoroadenosine-3'-phosphate
  modified_base 4: mod_base = OTHER; note = 2'-O-methylguanosine-3'-phosphate
  modified_base 5: mod_base = OTHER; note = 2'-fluorocytidine-3'-phosphate
  modified_base 6: mod_base = OTHER; note = 2'-O-methyluridine-3'-phosphate
  modified_base 7: mod_base = OTHER; note = 2'-fluorouridine-3'-phosphate
  modified_base 8: mod_base = OTHER; note = 2'-O-methylguanosine-3'-phosphate
  modified_base 9: mod_base = OTHER; note = 2'-fluorouridine-3'-phosphate
  modified_base 10: mod_base = OTHER; note = 2'-fluorouridine-3'-phosphate
  modified_base 11: mod_base = OTHER; note = 2'-fluorouridine-3'-phosphate
  modified_base 12: mod_base = OTHER; note = 2'-O-methylguanosine-3'-phosphate
  modified_base 13: mod_base = OTHER; note = 2'-fluorouridine-3'-phosphate
  modified_base 14: mod_base = OTHER; note = 2'-O-methylguanosine-3'-phosphate
  modified_base 15: mod_base = OTHER; note = 2'-fluoroadenosine-3'-phosphate
  modified_base 16: mod_base = OTHER; note = 2'-O-methyladenosine-3'-phosphate
  modified_base 17: mod_base = OTHER; note = 2'-fluoroadenosine-3'-phosphate
  modified_base 18: mod_base = OTHER; note = 2'-O-methylcytidine-3'-phosphate
  modified_base 19: mod_base = OTHER; note = 2'-fluoroadenosine-3'-phosphate
  modified_base 20: mod_base = OTHER; note = 2'-O-methyladenosine-3'-phosphate
  modified_base 21: mod_base = OTHER; note = 2'-fluoroadenosine-3'-phosphate N-[tris(GalNAc-alkyl)-amidodecanoyl)]-4-hydroxyprolinol Hyp-(GalNAc-alkyl)3
ccagcttgtttgtgaaacaaa

SEQ ID NO: 575 - RNA, 21 nt, synthetic construct
  source 1..21: mol_type = other RNA; note = Description of Artificial Sequence: Synthetic oligonucleotide
  modified_base 1: mod_base = OTHER; note = 2'-fluorouridine -3'-phosphorothioate
  modified_base 2: mod_base = OTHER; note = 2'-O-methyluridine-3'-phosphorothioate
  modified_base 3: mod_base = OTHER; note = 2'-fluorouridine-3'-phosphate
  modified_base 4: mod_base = OTHER; note = 2'-O-methylguanosine-3'-phosphate
  modified_base 5: mod_base = OTHER; note = 2'-fluorouridine-3'-phosphate
  modified_base 6: mod_base = OTHER; note = 2'-O-methyladenosine-3'-phosphate
  modified_base 7: mod_base = OTHER; note = 2'-fluorouridine-3'-phosphate
  modified_base 8: mod_base = OTHER; note = 2'-O-methyluridine-3'-phosphate
  modified_base 9: mod_base = OTHER; note = 2'-fluorouridine-3'-phosphate
  modified_base 10: mod_base = OTHER; note = 2'-fluoroadenosine-3'-phosphate
  modified_base 11: mod_base = OTHER; note = 2'-fluoroguanosine-3'-phosphate
  modified_base 12: mod_base = OTHER; note = 2'-O-methyluridine-3'-phosphate
  modified_base 13: mod_base = OTHER; note = 2'-fluoroguanosine-3'-phosphate
  modified_base 14: mod_base = OTHER; note = 2'-O-methyluridine-3'-phosphate
  modified_base 15: mod_base = OTHER; note = 2'-fluorocytidine-3'-phosphate
  modified_base 16: mod_base = OTHER; note = 2'-O-methyluridine-3'-phosphate
  modified_base 17: mod_base = OTHER; note = 2'-fluorouridine-3'-phosphate
  modified_base 18: mod_base = OTHER; note = 2'-O-methylguanosine-3'-phosphate
  modified_base 19: mod_base = OTHER; note = 2'-fluoroadenosine-3'-phosphate
  modified_base 20: mod_base = OTHER; note = 2'-O-methyladenosine-3'-phosphate
  modified_base 21: mod_base = OTHER; note = 2'-fluorouridine-3'-phosphate N-[tris(GalNAc-alkyl)-amidodecanoyl)]-4-hydroxyprolinol Hyp-(GalNAc-alkyl)3
tttgtatttagtgtcttgaat

SEQ ID NO: 576 - RNA, 21 nt, synthetic construct
  source 1..21: mol_type = other RNA; note = Description of Artificial Sequence: Synthetic oligonucleotide
  modified_base 1: mod_base = OTHER; note = 2'-fluoroadenosine-3'-phosphorothioate
  modified_base 2: mod_base = OTHER; note = 2'-O-methylguanosine-3'- phosphorothioate
  modified_base 3: mod_base = OTHER; note = 2'-fluorouridine-3'-phosphate
  modified_base 4: mod_base = OTHER; note = 2'-O-methyluridine-3'-phosphate
  modified_base 5: mod_base = OTHER; note = 2'-fluoroguanosine-3'-phosphate
  modified_base 6: mod_base = OTHER; note = 2'-O-methyladenosine-3'-phosphate
  modified_base 7: mod_base = OTHER; note = 2'-fluoroguanosine-3'-phosphate
  modified_base 8: mod_base = OTHER; note = 2'-O-methyladenosine-3'-phosphate
  modified_base 9: mod_base = OTHER; note = 2'-fluoroadenosine-3'-phosphate
  modified_base 10: mod_base = OTHER; note = 2'-fluorocytidine-3'-phosphate
  modified_base 11: mod_base = OTHER; note = 2'-fluoroadenosine-3'-phosphate
  modified_base 12: mod_base = OTHER; note = 2'-O-methyladenosine-3'-phosphate
  modified_base 13: mod_base = OTHER; note = 2'-fluoroadenosine-3'-phosphate
  modified_base 14: mod_base = OTHER; note = 2'-O-methyladenosine-3'-phosphate
  modified_base 15: mod_base = OTHER; note = 2'-fluoroadenosine-3'-phosphate
  modified_base 16: mod_base = OTHER; note = 2'-O-methyluridine-3'-phosphate
  modified_base 17: mod_base = OTHER; note = 2'-fluorouridine-3'-phosphate
  modified_base 18: mod_base = OTHER; note = 2'-O-methylguanosine-3'-phosphate
  modified_base 19: mod_base = OTHER; note = 2'-fluoroguanosine-3'-phosphate
  modified_base 20: mod_base = OTHER; note = 2'-O-methylguanosine-3'-phosphate
  modified_base 21: mod_base = OTHER; note = 2'-fluorouridine-3'-phosphate N-[tris(GalNAc-alkyl)-amidodecanoyl)]-4-hydroxyprolinol Hyp-(GalNAc-alkyl)3
agttgagaacaaaaattgggt

SEQ ID NO: 577 - RNA, 21 nt, synthetic construct
  source 1..21: mol_type = other RNA; note = Description of Artificial Sequence: Synthetic oligonucleotide
  modified_base 1: mod_base = OTHER; note = 2'-fluorocytidine-3'-phosphorothioate
  modified_base 2: mod_base = OTHER; note = 2'-O-methyladenosine-3'- phosphorothioate
  modified_base 3: mod_base = OTHER; note = 2'-fluoroadenosine-3'-phosphate
  modified_base 4: mod_base = OTHER; note = 2'-O-methylguanosine-3'-phosphate
  modified_base 5: mod_base = OTHER; note = 2'-fluoroguanosine-3'-phosphate
  modified_base 6: mod_base = OTHER; note = 2'-O-methyluridine-3'-phosphate
  modified_base 7: mod_base = OTHER; note = 2'-fluoroguanosine-3'-phosphate
  modified_base 8: mod_base = OTHER; note = 2'-O-methylguanosine-3'-phosphate
  modified_base 9: mod_base = OTHER; note = 2'-fluoroadenosine-3'-phosphate
  modified_base 10: mod_base = OTHER; note = 2'-fluoroguanosine-3'-phosphate
  modified_base 11: mod_base = OTHER; note = 2'-fluoroguanosine-3'-phosphate
  modified_base 12: mod_base = OTHER; note = 2'-O-methylguanosine-3'-phosphate
  modified_base 13: mod_base = OTHER; note = 2'-fluorouridine-3'-phosphate
  modified_base 14: mod_base = OTHER; note = 2'-O-methylcytidine-3'-phosphate
  modified_base 15: mod_base = OTHER; note = 2'-fluorouridine-3'-phosphate
  modified_base 16: mod_base = OTHER; note = 2'-O-methylcytidine-3'-phosphate
  modified_base 17: mod_base = OTHER; note = 2'-fluoroadenosine-3'-phosphate
  modified_base 18: mod_base = OTHER; note = 2'-O-methylcytidine-3'-phosphate
  modified_base 19: mod_base = OTHER; note = 2'-fluorouridine-3'-phosphate
  modified_base 20: mod_base = OTHER; note = 2'-O-methyluridine-3'-phosphate
  modified_base 21: mod_base = OTHER; note = 2'-fluorouridine-3'-phosphate N-[tris(GalNAc-alkyl)-amidodecanoyl)]-4-hydroxyprolinol Hyp-(GalNAc-alkyl)3
caaggtggagggtctcacttt

SEQ ID NO: 578 - RNA, 21 nt, synthetic construct
  source 1..21: mol_type = other RNA; note = Description of Artificial Sequence: Synthetic oligonucleotide
  modified_base 1: mod_base = OTHER; note = 2'-fluorocytidine-3'-phosphorothioate
  modified_base 2: mod_base = OTHER; note = 2'-O-methyladenosine-3'- phosphorothioate
  modified_base 3: mod_base = OTHER; note = 2'-fluorocytidine-3'-phosphate
  modified_base 4: mod_base = OTHER; note = 2'-O-methylcytidine-3'-phosphate
  modified_base 5: mod_base = OTHER; note = 2'-fluorocytidine-3'-phosphate
  modified_base 6: mod_base = OTHER; note = 2'-O-methylcytidine-3'-phosphate
  modified_base 7: mod_base = OTHER; note = 2'-fluorocytidine-3'-phosphate
  modified_base 8: mod_base = OTHER; note = 2'-O-methyladenosine-3'-phosphate
  modified_base 9: mod_base = OTHER; note = 2'-fluoroguanosine-3'-phosphate
  modified_base 10: mod_base = OTHER; note = 2'-fluorouridine-3'-phosphate
  modified_base 11: mod_base = OTHER; note = 2'-fluorocytidine-3'-phosphate
  modified_base 12: mod_base = OTHER; note = 2'-O-methyluridine-3'-phosphate
  modified_base 13: mod_base = OTHER; note = 2'-fluorocytidine-3'-phosphate
  modified_base 14: mod_base = OTHER; note = 2'-O-methylcytidine-3'-phosphate
  modified_base 15: mod_base = OTHER; note = 2'-fluorocytidine-3'-phosphate
  modified_base 16: mod_base = OTHER; note = 2'-O-methyladenosine-3'-phosphate
  modified_base 17: mod_base = OTHER; note = 2'-fluorocytidine-3'-phosphate
  modified_base 18: mod_base = OTHER; note = 2'-O-methylcytidine-3'-phosphate
  modified_base 19: mod_base = OTHER; note = 2'-fluorouridine-3'-phosphate
  modified_base 20: mod_base = OTHER; note = 2'-O-methyluridine-3'-phosphate
  modified_base 21: mod_base = OTHER; note = 2'-fluorouridine-3'-phosphate N-[tris(GalNAc-alkyl)-amidodecanoyl)]-4-hydroxyprolinol Hyp-(GalNAc-alkyl)3
cacccccagtctcccaccttt

SEQ ID NO: 579 - RNA, 21 nt, synthetic construct
  source 1..21: mol_type = other RNA; note = Description of Artificial Sequence: Synthetic oligonucleotide
  modified_base 1: mod_base = OTHER; note = 2'-fluorouridine -3'-phosphorothioate
  modified_base 2: mod_base = OTHER; note = 2'-O-methylguanosine-3'- phosphorothioate
  modified_base 3: mod_base = OTHER; note = 2'-fluorocytidine-3'-phosphate
  modified_base 4: mod_base = OTHER; note = 2'-O-methyladenosine-3'-phosphate
  modified_base 5: mod_base = OTHER; note = 2'-fluoroguanosine-3'-phosphate
  modified_base 6: mod_base = OTHER; note = 2'-O-methylguanosine-3'-phosphate
  modified_base 7: mod_base = OTHER; note = 2'-fluorocytidine-3'-phosphate
  modified_base 8: mod_base = OTHER; note = 2'-O-methyluridine-3'-phosphate
  modified_base 9: mod_base = OTHER; note = 2'-fluoroguanosine-3'-phosphate
  modified_base 10: mod_base = OTHER; note = 2'-fluorouridine-3'-phosphate
  modified_base 11: mod_base = OTHER; note = 2'-fluoroguanosine-3'-phosphate
  modified_base 12: mod_base = OTHER; note = 2'-O-methyladenosine-3'-phosphate
  modified_base 13: mod_base = OTHER; note = 2'-fluorocytidine-3'-phosphate
  modified_base 14: mod_base = OTHER; note = 2'-O-methyladenosine-3'-phosphate
  modified_base 15: mod_base = OTHER; note = 2'-fluoroguanosine-3'-phosphate
  modified_base 16: mod_base = OTHER; note = 2'-O-methylguanosine-3'-phosphate
  modified_base 17: mod_base = OTHER; note = 2'-fluoroadenosine-3'-phosphate
  modified_base 18: mod_base = OTHER; note = 2'-O-methyluridine-3'-phosphate
  modified_base 19: mod_base = OTHER; note = 2'-fluoroguanosine-3'-phosphate
  modified_base 20: mod_base = OTHER; note = 2'-O-methylguanosine-3'-phosphate
  modified_base 21: mod_base = OTHER; note = 2'-fluoroadenosine-3'-phosphate N-[tris(GalNAc-alkyl)-amidodecanoyl)]-4-hydroxyprolinol Hyp-(GalNAc-alkyl)3
tgcaggctgtgacaggatgga

SEQ ID NO: 580 - RNA, 21 nt, synthetic construct
  source 1..21: mol_type = other RNA; note = Description of Artificial Sequence: Synthetic oligonucleotide
  modified_base 1: mod_base = OTHER; note = 2'-fluorouridine -3'-phosphorothioate
  modified_base 2: mod_base = OTHER; note = 2'-O-methylcytidine-3'- phosphorothioate
  modified_base 3: mod_base = OTHER; note = 2'-fluorocytidine-3'-phosphate
  modified_base 4: mod_base = OTHER; note = 2'-O-methyladenosine-3'-phosphate
  modified_base 5: mod_base = OTHER; note = 2'-fluoroadenosine-3'-phosphate
  modified_base 6: mod_base = OTHER; note = 2'-O-methyladenosine-3'-phosphate
  modified_base 7: mod_base = OTHER; note = 2'-fluoroadenosine-3'-phosphate
  modified_base 8: mod_base = OTHER; note = 2'-O-methyladenosine-3'-phosphate
  modified_base 9: mod_base = OTHER; note = 2'-fluoroguanosine-3'-phosphate
  modified_base 10: mod_base = OTHER; note = 2'-fluoroadenosine-3'-phosphate
  modified_base 11: mod_base = OTHER; note = 2'-fluoroadenosine-3'-phosphate
  modified_base 12: mod_base = OTHER; note = 2'-O-methyluridine-3'-phosphate
  modified_base 13: mod_base = OTHER; note = 2'-fluorouridine-3'-phosphate
  modified_base 14: mod_base = OTHER; note = 2'-O-methylcytidine-3'-phosphate
  modified_base 15: mod_base = OTHER; note = 2'-fluorocytidine-3'-phosphate
  modified_base 16: mod_base = OTHER; note = 2'-O-methyladenosine-3'-phosphate
  modified_base 17: mod_base = OTHER; note = 2'-fluoroadenosine-3'-phosphate
  modified_base 18: mod_base = OTHER; note = 2'-O-methylcytidine-3'-phosphate
  modified_base 19: mod_base = OTHER; note = 2'-fluorocytidine-3'-phosphate
  modified_base 20: mod_base = OTHER; note = 2'-O-methylguanosine-3'-phosphate
  modified_base 21: mod_base = OTHER; note = 2'-fluoroadenosine-3'-phosphate N-[tris(GalNAc-alkyl)-amidodecanoyl)]-4-hydroxyprolinol Hyp-(GalNAc-alkyl)3
tccaaaaagaattccaaccga

SEQ ID NO: 581 - RNA, 21 nt, synthetic construct
  source 1..21: mol_type = other RNA; note = Description of Artificial Sequence: Synthetic oligonucleotide
  modified_base 1: mod_base = OTHER; note = 2'-fluorocytidine-3'-phosphorothioate
  modified_base 2: mod_base = OTHER; note = 2'-O-methylcytidine-3'- phosphorothioate
  modified_base 3: mod_base = OTHER; note = 2'-fluorouridine-3'-phosphate
  modified_base 4: mod_base = OTHER; note = 2'-O-methylguanosine-3'-phosphate
  modified_base 5: mod_base = OTHER; note = 2'-fluoroguanosine-3'-phosphate
  modified_base 6: mod_base = OTHER; note = 2'-O-methyladenosine-3'-phosphate
  modified_base 7: mod_base = OTHER; note = 2'-fluorocytidine-3'-phosphate
  modified_base 8: mod_base = OTHER; note = 2'-O-methyladenosine-3'-phosphate
  modified_base 9: mod_base = OTHER; note = 2'-fluoroadenosine-3'-phosphate
  modified_base 10: mod_base = OTHER; note = 2'-fluoroguanosine-3'-phosphate
  modified_base 11: mod_base = OTHER; note = 2'-fluoroguanosine-3'-phosphate
  modified_base 12: mod_base = OTHER; note = 2'-O-methyluridine-3'-phosphate
  modified_base 13: mod_base = OTHER; note = 2'-fluoroguanosine-3'-phosphate
  modified_base 14: mod_base = OTHER; note = 2'-O-methylguanosine-3'-phosphate
  modified_base 15: mod_base = OTHER; note = 2'-fluoroadenosine-3'-phosphate
  modified_base 16: mod_base = OTHER; note = 2'-O-methylguanosine-3'-phosphate
  modified_base 17: mod_base = OTHER; note = 2'-fluoroguanosine-3'-phosphate
  modified_base 18: mod_base = OTHER; note = 2'-O-methylguanosine-3'-phosphate
  modified_base 19: mod_base = OTHER; note = 2'-fluorouridine-3'-phosphate
  modified_base 20: mod_base = OTHER; note = 2'-O-methylcytidine-3'-phosphate
  modified_base 21: mod_base = OTHER; note = 2'-fluorouridine-3'-phosphate N-[tris(GalNAc-alkyl)-amidodecanoyl)]-4-hydroxyprolinol Hyp-(GalNAc-alkyl)3
cctggacaaggtggagggtct

SEQ ID NO: 582 - RNA, 21 nt, synthetic construct
  source 1..21: mol_type = other RNA; note = Description of Artificial Sequence: Synthetic oligonucleotide
  modified_base 1: mod_base = OTHER; note = 2'-fluorocytidine-3'-phosphorothioate
  modified_base 2: mod_base = OTHER; note = 2'-O-methylcytidine-3'- phosphorothioate
  modified_base 3: mod_base = OTHER; note = 2'-fluoroguanosine-3'-phosphate
  modified_base 4: mod_base = OTHER; note = 2'-O-methyluridine-3'-phosphate
  modified_base 5: mod_base = OTHER; note = 2'-fluoroadenosine-3'-phosphate
  modified_base 6: mod_base = OTHER; note = 2'-O-methyluridine-3'-phosphate
  modified_base 7: mod_base = OTHER; note = 2'-fluoroadenosine-3'-phosphate
  modified_base 8: mod_base = OTHER; note = 2'-O-methyluridine-3'-phosphate
  modified_base 9: mod_base = OTHER; note = 2'-fluoroadenosine-3'-phosphate
  modified_base 10: mod_base = OTHER; note = 2'-fluorouridine-3'-phosphate
  modified_base 11: mod_base = OTHER; note = 2'-fluoroguanosine-3'-phosphate
  modified_base 12: mod_base = OTHER; note = 2'-O-methylguanosine-3'-phosphate
  modified_base 13: mod_base = OTHER; note = 2'-fluorocytidine-3'-phosphate
  modified_base 14: mod_base = OTHER; note = 2'-O-methyladenosine-3'-phosphate
  modified_base 15: mod_base = OTHER; note = 2'-fluorouridine-3'-phosphate
  modified_base 16: mod_base = OTHER; note = 2'-O-methylguanosine-3'-phosphate
  modified_base 17: mod_base = OTHER; note = 2'-fluorocytidine-3'-phosphate
  modified_base 18: mod_base = OTHER; note = 2'-O-methyladenosine-3'-phosphate
  modified_base 19: mod_base = OTHER; note = 2'-fluorocytidine-3'-phosphate
  modified_base 20: mod_base = OTHER; note = 2'-O-methyladenosine-3'-phosphate
  modified_base 21: mod_base = OTHER; note = 2'-fluoroadenosine-3'-phosphate N-[tris(GalNAc-alkyl)-amidodecanoyl)]-4-hydroxyprolinol Hyp-(GalNAc-alkyl)3
ccgtatatatggcatgcacaa

SEQ ID NO: 583 - RNA, 21 nt, synthetic construct
  source 1..21: mol_type = other RNA; note = Description of Artificial Sequence: Synthetic oligonucleotide
  modified_base 1: mod_base = OTHER; note = 2'-fluorouridine -3'-phosphorothioate
  modified_base 2: mod_base = OTHER; note = 2'-O-methylguanosine-3'- phosphorothioate
  modified_base 3: mod_base = OTHER; note = 2'-fluorouridine-3'-phosphate
  modified_base 4: mod_base = OTHER; note = 2'-O-methyluridine-3'-phosphate
  modified_base 5: mod_base = OTHER; note = 2'-fluorocytidine-3'-phosphate
  modified_base 6: mod_base = OTHER; note = 2'-O-methylcytidine-3'-phosphate
  modified_base 7: mod_base = OTHER; note = 2'-fluorocytidine-3'-phosphate
  modified_base 8: mod_base = OTHER; note = 2'-O-methyluridine-3'-phosphate
  modified_base 9: mod_base = OTHER; note = 2'-fluorouridine-3'-phosphate
  modified_base 10: mod_base = OTHER; note = 2'-fluorouridine-3'-phosphate
  modified_base 11: mod_base = OTHER; note = 2'-fluorouridine-3'-phosphate
  modified_base 12: mod_base = OTHER; note = 2'-O-methylcytidine-3'-phosphate
  modified_base 13: mod_base = OTHER; note = 2'-fluoroadenosine-3'-phosphate
  modified_base 14: mod_base = OTHER; note = 2'-O-methyladenosine-3'-phosphate
  modified_base 15: mod_base = OTHER; note = 2'-fluoroguanosine-3'-phosphate
  modified_base 16: mod_base = OTHER; note = 2'-O-methyluridine-3'-phosphate
  modified_base 17: mod_base = OTHER; note = 2'-fluorouridine-3'-phosphate
  modified_base 18: mod_base = OTHER; note = 2'-O-methylguanosine-3'-phosphate
  modified_base 19: mod_base = OTHER; note = 2'-fluoroadenosine-3'-phosphate
  modified_base 20: mod_base = OTHER; note = 2'-O-methylguanosine-3'-phosphate
  modified_base 21: mod_base = OTHER; note = 2'-fluoroadenosine-3'-phosphate N-[tris(GalNAc-alkyl)-amidodecanoyl)]-4-hydroxyprolinol Hyp-(GalNAc-alkyl)3
tgttcccttttcaagttgaga

SEQ ID NO: 584 - RNA, 21 nt, synthetic construct
  source 1..21: mol_type = other RNA; note = Description of Artificial Sequence: Synthetic oligonucleotide
  modified_base 1: mod_base = OTHER; note = 2'-fluoroguanosine-3'-phosphorothioate
  modified_base 2: mod_base = OTHER; note = 2'-O-methylcytidine-3'- phosphorothioate
  modified_base 3: mod_base = OTHER; note = 2'-fluoroguanosine-3'-phosphate
  modified_base 4: mod_base = OTHER; note = 2'-O-methylguanosine-3'-phosphate
  modified_base 5: mod_base = OTHER; note = 2'-fluoroadenosine-3'-phosphate
  modified_base 6: mod_base = OTHER; note = 2'-O-methyluridine-3'-phosphate
  modified_base 7: mod_base = OTHER; note = 2'-fluoroguanosine-3'-phosphate
  modified_base 8: mod_base = OTHER; note = 2'-O-methyladenosine-3'-phosphate
  modified_base 9: mod_base = OTHER; note = 2'-fluoroguanosine-3'-phosphate
  modified_base 10: mod_base = OTHER; note = 2'-fluoroadenosine-3'-phosphate
  modified_base 11: mod_base = OTHER; note = 2'-fluoroguanosine-3'-phosphate
  modified_base 12: mod_base = OTHER; note = 2'-O-methyladenosine-3'-phosphate
  modified_base 13: mod_base = OTHER; note = 2'-fluoroguanosine-3'-phosphate
  modified_base 14: mod_base = OTHER; note = 2'-O-methyladenosine-3'-phosphate
  modified_base 15: mod_base = OTHER; note = 2'-fluoroguanosine-3'-phosphate
  modified_base 16: mod_base = OTHER; note = 2'-O-methylcytidine-3'-phosphate
  modified_base 17: mod_base = OTHER; note = 2'-fluorocytidine-3'-phosphate
  modified_base 18: mod_base = OTHER; note = 2'-O-methylcytidine-3'-phosphate
  modified_base 19: mod_base = OTHER; note = 2'-fluoroadenosine-3'-phosphate
  modified_base 20: mod_base = OTHER; note = 2'-O-methylcytidine-3'-phosphate
  modified_base 21: mod_base = OTHER; note = 2'-fluoroadenosine-3'-phosphate N-[tris(GalNAc-alkyl)-amidodecanoyl)]-4-hydroxyprolinol Hyp-(GalNAc-alkyl)3
gcggatgagagagagcccaca

SEQ ID NO: 585 - RNA, 21 nt, synthetic construct
  source 1..21: mol_type = other RNA; note = Description of Artificial Sequence: Synthetic oligonucleotide
  modified_base 1: mod_base = OTHER; note = 2'-fluoroguanosine-3'-phosphorothioate
  modified_base 2: mod_base = OTHER; note = 2'-O-methyladenosine-3'- phosphorothioate
  modified_base 3: mod_base = OTHER; note = 2'-fluoroadenosine-3'-phosphate
  modified_base 4: mod_base = OTHER; note = 2'-O-methylcytidine-3'-phosphate
  modified_base 5: mod_base = OTHER; note = 2'-fluorocytidine-3'-phosphate
  modified_base 6: mod_base = OTHER; note = 2'-O-methyluridine-3'-phosphate
  modified_base 7: mod_base = OTHER; note = 2'-fluoroguanosine-3'-phosphate
  modified_base 8: mod_base = OTHER; note = 2'-O-methylcytidine-3'-phosphate
  modified_base 9: mod_base = OTHER; note = 2'-fluoroadenosine-3'-phosphate
  modified_base 10: mod_base = OTHER; note = 2'-fluoroadenosine-3'-phosphate
  modified_base 11: mod_base = OTHER; note = 2'-fluoroadenosine-3'-phosphate
  modified_base 12: mod_base = OTHER; note = 2'-O-methyladenosine-3'-phosphate
  modified_base 13: mod_base = OTHER; note = 2'-fluoroadenosine-3'-phosphate
  modified_base 14: mod_base = OTHER; note = 2'-O-methyluridine-3'-phosphate
  modified_base 15: mod_base = OTHER; note = 2'-fluorouridine-3'-phosphate
  modified_base 16: mod_base = OTHER; note = 2'-O-methylguanosine-3'-phosphate
  modified_base 17: mod_base = OTHER; note = 2'-fluoroadenosine-3'-phosphate
  modified_base 18: mod_base = OTHER; note = 2'-O-methylguanosine-3'-phosphate
  modified_base 19: mod_base = OTHER; note = 2'-fluorocytidine-3'-phosphate
  modified_base 20: mod_base = OTHER; note = 2'-O-methyladenosine-3'-phosphate
  modified_base 21: mod_base = OTHER; note = 2'-fluoroadenosine-3'-phosphate N-[tris(GalNAc-alkyl)-amidodecanoyl)]-4-hydroxyprolinol Hyp-(GalNAc-alkyl)3
gaacctgcaaaaattgagcaa

SEQ ID NO: 586 - RNA, 21 nt, synthetic construct
  source 1..21: mol_type = other RNA; note = Description of Artificial Sequence: Synthetic oligonucleotide
  modified_base 1: mod_base = OTHER; note = 2'-fluoroadenosine-3'-phosphorothioate
  modified_base 2: mod_base = OTHER; note = 2'-O-methyladenosine-3'- phosphorothioate
  modified_base 3: mod_base = OTHER; note = 2'-fluoroguanosine-3'-phosphate
  modified_base 4: mod_base = OTHER; note = 2'-O-methyluridine-3'-phosphate
  modified_base 5: mod_base = OTHER; note = 2'-fluorouridine-3'-phosphate
  modified_base 6: mod_base = OTHER; note = 2'-O-methylguanosine-3'-phosphate
  modified_base 7: mod_base = OTHER; note = 2'-fluoroadenosine-3'-phosphate
  modified_base 8: mod_base = OTHER; note = 2'-O-methylguanosine-3'-phosphate
  modified_base 9: mod_base = OTHER; note = 2'-fluoroadenosine-3'-phosphate
  modified_base 10: mod_base = OTHER; note = 2'-fluoroadenosine-3'-phosphate
  modified_base 11: mod_base = OTHER; note = 2'-fluorocytidine-3'-phosphate
  modified_base 12: mod_base = OTHER; note = 2'-O-methyladenosine-3'-phosphate
  modified_base 13: mod_base = OTHER; note = 2'-fluoroadenosine-3'-phosphate
  modified_base 14: mod_base = OTHER; note = 2'-O-methyladenosine-3'-phosphate
  modified_base 15: mod_base = OTHER; note = 2'-fluoroadenosine-3'-phosphate
  modified_base 16: mod_base = OTHER; note = 2'-O-methyladenosine-3'-phosphate
  modified_base 17: mod_base = OTHER; note = 2'-fluorouridine-3'-phosphate
  modified_base 18: mod_base = OTHER; note = 2'-O-methyluridine-3'-phosphate
  modified_base 19: mod_base = OTHER; note = 2'-fluoroguanosine-3'-phosphate
  modified_base 20: mod_base = OTHER; note = 2'-O-methylguanosine-3'-phosphate
  modified_base 21: mod_base = OTHER; note = 2'-fluoroadenosine-3'-phosphate N-[tris(GalNAc-alkyl)-amidodecanoyl)]-4-hydroxyprolinol Hyp-(GalNAc-alkyl)3
aagttgagaacaaaaattgga

SEQ ID NO: 587 - RNA, 21 nt, synthetic construct
  source 1..21: mol_type = other RNA; note = Description of Artificial Sequence: Synthetic oligonucleotide
  modified_base 1: mod_base = OTHER; note = 2'-fluorocytidine-3'-phosphorothioate
  modified_base 2: mod_base = OTHER; note = 2'-O-methylcytidine-3'- phosphorothioate
  modified_base 3: mod_base = OTHER; note = 2'-fluorouridine-3'-phosphate
  modified_base 4: mod_base = OTHER; note = 2'-O-methylguanosine-3'-phosphate
  modified_base 5: mod_base = OTHER; note = 2'-fluorocytidine-3'-phosphate
  modified_base 6: mod_base = OTHER; note = 2'-O-methyladenosine-3'-phosphate
  modified_base 7: mod_base = OTHER; note = 2'-fluoroadenosine-3'-phosphate
  modified_base 8: mod_base = OTHER; note = 2'-O-methyladenosine-3'-phosphate
  modified_base 9: mod_base = OTHER; note = 2'-fluoroadenosine-3'-phosphate
  modified_base 10: mod_base = OTHER; note = 2'-fluoroadenosine-3'-phosphate
  modified_base 11: mod_base = OTHER; note = 2'-fluorouridine-3'-phosphate
  modified_base 12: mod_base = OTHER; note = 2'-O-methyluridine-3'-phosphate
  modified_base 13: mod_base = OTHER; note = 2'-fluoroguanosine-3'-phosphate
  modified_base 14: mod_base = OTHER; note = 2'-O-methyladenosine-3'-phosphate
  modified_base 15: mod_base = OTHER; note = 2'-fluoroguanosine-3'-phosphate
  modified_base 16: mod_base = OTHER; note = 2'-O-methylcytidine-3'-phosphate
  modified_base 17: mod_base = OTHER; note = 2'-fluoroadenosine-3'-phosphate
  modified_base 18: mod_base = OTHER; note = 2'-O-methyladenosine-3'-phosphate
  modified_base 19: mod_base = OTHER; note = 2'-fluorouridine-3'-phosphate
  modified_base 20: mod_base = OTHER; note = 2'-O-methylguanosine-3'-phosphate
  modified_base 21: mod_base = OTHER; note = 2'-fluoroadenosine-3'-phosphate N-[tris(GalNAc-alkyl)-amidodecanoyl)]-4-hydroxyprolinol Hyp-(GalNAc-alkyl)3
cctgcaaaaattgagcaatga

SEQ ID NO: 588 - RNA, 21 nt, synthetic construct
  source 1..21: mol_type = other RNA; note = Description of Artificial Sequence: Synthetic oligonucleotide
  modified_base 1: mod_base = OTHER; note = 2'-fluorocytidine-3'-phosphorothioate
  modified_base 2: mod_base = OTHER; note = 2'-O-methylguanosine-3'- phosphorothioate
  modified_base 3: mod_base = OTHER; note = 2'-fluoroguanosine-3'-phosphate
  modified_base 4: mod_base = OTHER; note = 2'-O-methylguanosine-3'-phosphate
  modified_base 5: mod_base = OTHER; note = 2'-fluoroadenosine-3'-phosphate
  modified_base 6: mod_base = OTHER; note = 2'-O-methyluridine-3'-phosphate
  modified_base 7: mod_base = OTHER; note = 2'-fluoroguanosine-3'-phosphate
  modified_base 8: mod_base = OTHER; note = 2'-O-methylcytidine-3'-phosphate
  modified_base 9: mod_base = OTHER; note = 2'-fluorouridine-3'-phosphate
  modified_base 10: mod_base = OTHER; note = 2'-fluoroguanosine-3'-phosphate
  modified_base 11: mod_base = OTHER; note = 2'-fluoroguanosine-3'-phosphate
  modified_base 12: mod_base = OTHER; note = 2'-O-methylcytidine-3'-phosphate
  modified_base 13: mod_base = OTHER; note = 2'-fluorocytidine-3'-phosphate
  modified_base 14: mod_base = OTHER; note = 2'-O-methyladenosine-3'-phosphate
  modified_base 15: mod_base = OTHER; note = 2'-fluoroadenosine-3'-phosphate
  modified_base 16: mod_base = OTHER; note = 2'-O-methylcytidine-3'-phosphate
  modified_base 17: mod_base = OTHER; note = 2'-fluorouridine-3'-phosphate
  modified_base 18: mod_base = OTHER; note = 2'-O-methyluridine-3'-phosphate
  modified_base 19: mod_base = OTHER; note = 2'-fluorocytidine-3'-phosphate
  modified_base 20: mod_base = OTHER; note = 2'-O-methyluridine-3'-phosphate
  modified_base 21: mod_base = OTHER; note = 2'-fluorouridine-3'-phosphate N-[tris(GalNAc-alkyl)-amidodecanoyl)]-4-hydroxyprolinol Hyp-(GalNAc-alkyl)3
cgggatgctggccaacttctt

SEQ ID NO: 589 - RNA, 21 nt, synthetic construct
  source 1..21: mol_type = other RNA; note = Description of Artificial Sequence: Synthetic oligonucleotide
  modified_base 1: mod_base = OTHER; note = 2'-fluorouridine -3'-phosphorothioate
  modified_base 2: mod_base = OTHER; note = 2'-O-methylcytidine-3'- phosphorothioate
  modified_base 3: mod_base = OTHER; note = 2'-fluorouridine-3'-phosphate
  modified_base 4: mod_base = OTHER; note = 2'-O-methyluridine-3'-phosphate
  modified_base 5: mod_base = OTHER; note = 2'-fluoroguanosine-3'-phosphate
  modified_base 6: mod_base = OTHER; note = 2'-O-methyladenosine-3'-phosphate
  modified_base 7: mod_base = OTHER; note = 2'-fluoroadenosine-3'-phosphate
  modified_base 8: mod_base = OTHER; note = 2'-O-methyluridine-3'-phosphate
  modified_base 9: mod_base = OTHER; note = 2'-fluoroguanosine-3'-phosphate
  modified_base 10: mod_base = OTHER; note = 2'-fluorouridine-3'-phosphate
  modified_base 11: mod_base = OTHER; note = 2'-fluoroadenosine-3'-phosphate
  modified_base 12: mod_base = OTHER; note = 2'-O-methyladenosine-3'-phosphate
  modified_base 13: mod_base = OTHER; note = 2'-fluoroguanosine-3'-phosphate
  modified_base 14: mod_base = OTHER; note = 2'-O-methyladenosine-3'-phosphate
  modified_base 15: mod_base = OTHER; note = 2'-fluoroadenosine-3'-phosphate
  modified_base 16: mod_base = OTHER; note = 2'-O-methylcytidine-3'-phosphate
  modified_base 17: mod_base = OTHER; note = 2'-fluoroadenosine-3'-phosphate
  modified_base 18: mod_base = OTHER; note = 2'-O-methyluridine-3'-phosphate
  modified_base 19: mod_base = OTHER; note = 2'-fluoroguanosine-3'-phosphate
  modified_base 20: mod_base = OTHER; note = 2'-O-methyladenosine-3'-phosphate
  modified_base 21: mod_base = OTHER; note = 2'-fluoroadenosine-3'-phosphate N-[tris(GalNAc-alkyl)-amidodecanoyl)]-4-hydroxyprolinol Hyp-(GalNAc-alkyl)3
tcttgaatgtaagaacatgaa

SEQ ID NO: 590 - RNA, 21 nt, synthetic construct
  source 1..21: mol_type = other RNA; note = Description of Artificial Sequence: Synthetic oligonucleotide
  modified_base 1: mod_base = OTHER; note = 2'-fluorouridine -3'-phosphorothioate
  modified_base 2: mod_base = OTHER; note = 2'-O-methyluridine-3'-phosphorothioate
  modified_base 3: mod_base = OTHER; note = 2'-fluorocytidine-3'-phosphate
  modified_base 4: mod_base = OTHER; note = 2'-O-methylcytidine-3'-phosphate
  modified_base 5: mod_base = OTHER; note = 2'-fluoroadenosine-3'-phosphate
  modified_base 6: mod_base = OTHER; note = 2'-O-methylcytidine-3'-phosphate
  modified_base 7: mod_base = OTHER; note = 2'-fluoroadenosine-3'-phosphate
  modified_base 8: mod_base = OTHER; note = 2'-O-methylguanosine-3'-phosphate
  modified_base 9: mod_base = OTHER; note = 2'-fluoroadenosine-3'-phosphate
  modified_base 10: mod_base = OTHER; note = 2'-fluorouridine-3'-phosphate
  modified_base 11: mod_base = OTHER; note = 2'-fluoroguanosine-3'-phosphate
  modified_base 12: mod_base = OTHER; note = 2'-O-methylcytidine-3'-phosphate
  modified_base 13: mod_base = OTHER; note = 2'-fluorouridine-3'-phosphate
  modified_base 14: mod_base = OTHER; note = 2'-O-methyluridine-3'-phosphate
  modified_base 15: mod_base = OTHER; note = 2'-fluoroguanosine-3'-phosphate
  modified_base 16: mod_base = OTHER; note = 2'-O-methyluridine-3'-phosphate
  modified_base 17: mod_base = OTHER; note = 2'-fluoroguanosine-3'-phosphate
  modified_base 18: mod_base = OTHER; note = 2'-O-methyladenosine-3'-phosphate
  modified_base 19: mod_base = OTHER; note = 2'-fluorouridine-3'-phosphate
  modified_base 20: mod_base = OTHER; note = 2'-O-methyluridine-3'-phosphate
  modified_base 21: mod_base = OTHER; note = 2'-fluorouridine-3'-phosphate N-[tris(GalNAc-alkyl)-amidodecanoyl)]-4-hydroxyprolinol Hyp-(GalNAc-alkyl)3
ttccacagatgcttgtgattt

SEQ ID NO: 591 - RNA, 21 nt, synthetic construct
  source 1..21: mol_type = other RNA; note = Description of Artificial Sequence: Synthetic oligonucleotide
  modified_base 1: mod_base = OTHER; note = 2'-fluoroadenosine-3'-phosphorothioate
  modified_base 2: mod_base = OTHER; note = 2'-O-methylguanosine-3'- phosphorothioate
  modified_base 3: mod_base = OTHER; note = 2'-fluorocytidine-3'-phosphate
  modified_base 4: mod_base = OTHER; note = 2'-O-methyluridine-3'-phosphate
  modified_base 5: mod_base = OTHER; note = 2'-fluoroadenosine-3'-phosphate
  modified_base 6: mod_base = OTHER; note = 2'-O-methyluridine-3'-phosphate
  modified_base 7: mod_base = OTHER; note = 2'-fluoroguanosine-3'-phosphate
  modified_base 8: mod_base = OTHER; note = 2'-O-methylguanosine-3'-phosphate
  modified_base 9: mod_base = OTHER; note = 2'-fluoroguanosine-3'-phosphate
  modified_base 10: mod_base = OTHER; note = 2'-fluoroguanosine-3'-phosphate
  modified_base 11: mod_base = OTHER; note = 2'-fluorocytidine-3'-phosphate
  modified_base 12: mod_base = OTHER; note = 2'-O-methylguanosine-3'-phosphate
  modified_base 13: mod_base = OTHER; note = 2'-fluorouridine-3'-phosphate
  modified_base 14: mod_base = OTHER; note = 2'-O-methylguanosine-3'-phosphate
  modified_base 15: mod_base = OTHER; note = 2'-fluoroguanosine-3'-phosphate
  modified_base 16: mod_base = OTHER; note = 2'-O-methyluridine-3'-phosphate
  modified_base 17: mod_base = OTHER; note = 2'-fluorocytidine-3'-phosphate
  modified_base 18: mod_base = OTHER; note = 2'-O-methylcytidine-3'-phosphate
  modified_base 19: mod_base = OTHER; note = 2'-fluoroadenosine-3'-phosphate
  modified_base 20: mod_base = OTHER; note = 2'-O-methyluridine-3'-phosphate
  modified_base 21: mod_base = OTHER; note = 2'-fluoroadenosine-3'-phosphate N-[tris(GalNAc-alkyl)-amidodecanoyl)]-4-hydroxyprolinol Hyp-(GalNAc-alkyl)3
agctatggggcgtggtccata

SEQ ID NO: 592 - RNA, 21 nt, synthetic construct
  source 1..21: mol_type = other RNA; note = Description of Artificial Sequence: Synthetic oligonucleotide
  modified_base 1: mod_base = OTHER; note = 2'-fluorouridine -3'-phosphorothioate
  modified_base 2: mod_base = OTHER; note = 2'-O-methylcytidine-3'- phosphorothioate
  modified_base 3: mod_base = OTHER; note = 2'-fluorouridine-3'-phosphate
  modified_base 4: mod_base = OTHER; note = 2'-O-methylcytidine-3'-phosphate
  modified_base 5: mod_base = OTHER; note = 2'-fluorocytidine-3'-phosphate
  modified_base 6: mod_base = OTHER; note = 2'-O-methylcytidine-3'-phosphate
  modified_base 7: mod_base = OTHER; note = 2'-fluorocytidine-3'-phosphate
  modified_base 8: mod_base = OTHER; note = 2'-O-methyladenosine-3'-phosphate
  modified_base 9: mod_base = OTHER; note = 2'-fluoroadenosine-3'-phosphate
  modified_base 10: mod_base = OTHER; note = 2'-fluorocytidine-3'-phosphate
  modified_base 11: mod_base = OTHER; note = 2'-fluoroguanosine-3'-phosphate
  modified_base 12: mod_base = OTHER; note = 2'-O-methylguanosine-3'-phosphate
  modified_base 13: mod_base = OTHER; note = 2'-fluorocytidine-3'-phosphate
  modified_base 14: mod_base = OTHER; note = 2'-O-methyluridine-3'-phosphate
  modified_base 15: mod_base = OTHER; note = 2'-fluoroguanosine-3'-phosphate
  modified_base 16: mod_base = OTHER; note = 2'-O-methyluridine-3'-phosphate
  modified_base 17: mod_base = OTHER; note = 2'-fluorocytidine-3'-phosphate
  modified_base 18: mod_base = OTHER; note = 2'-O-methyluridine-3'-phosphate
  modified_base 19: mod_base = OTHER; note = 2'-fluorouridine-3'-phosphate
  modified_base 20: mod_base = OTHER; note = 2'-O-methyluridine-3'-phosphate
  modified_base 21: mod_base = OTHER; note = 2'-fluoroadenosine-3'-phosphate N-[tris(GalNAc-alkyl)-amidodecanoyl)]-4-hydroxyprolinol Hyp-(GalNAc-alkyl)3
tctccccaacggctgtcttta

SEQ ID NO: 593 - RNA, 23 nt, synthetic construct
  source 1..23: mol_type = other RNA; note = Description of Artificial Sequence: Synthetic oligonucleotide
  modified_base 1: mod_base = OTHER; note = 2'-O-methyluridine-3'-phosphorothioate
  modified_base 2: mod_base = OTHER; note = 2'-fluorouridine -3'-phosphorothioate
  modified_base 3: mod_base = OTHER; note = 2'-O-methyluridine-3'-phosphate
  modified_base 4: mod_base = OTHER; note = 2'-fluorouridine-3'-phosphate
  modified_base 5: mod_base = OTHER; note = 2'-O-methylguanosine-3'-phosphate
  modified_base 6: mod_base = OTHER; note = 2'-fluorouridine-3'-phosphate
  modified_base 7: mod_base = OTHER; note = 2'-O-methyluridine-3'-phosphate
  modified_base 8: mod_base = OTHER; note = 2'-fluorouridine-3'-phosphate
  modified_base 9: mod_base = OTHER; note = 2'-O-methylcytidine-3'-phosphate
  modified_base 10: mod_base = OTHER; note = 2'-fluoroadenosine-3'-phosphate
  modified_base 11: mod_base = OTHER; note = 2'-O-methylcytidine-3'-phosphate
  modified_base 12: mod_base = OTHER; note = 2'-O-methyladenosine-3'-phosphate
  modified_base 13: mod_base = OTHER; note = 2'-O-methyladenosine-3'-phosphate
  modified_base 14: mod_base = OTHER; note = 2'-fluoroadenosine-3'-phosphate
  modified_base 15: mod_base = OTHER; note = 2'-O-methylcytidine-3'-phosphate
  modified_base 16: mod_base = OTHER; note = 2'-fluoroadenosine-3'-phosphate
  modified_base 17: mod_base = OTHER; note = 2'-O-methyladenosine-3'-phosphate
  modified_base 18: mod_base = OTHER; note = 2'-fluoroguanosine-3'-phosphate
  modified_base 19: mod_base = OTHER; note = 2'-O-methylcytidine-3'-phosphate
  modified_base 20: mod_base = OTHER; note = 2'-fluorouridine-3'-phosphate
  modified_base 21: mod_base = OTHER; note = 2'-O-methylguanosine-3'- phosphorothioate
  modified_base 22: mod_base = OTHER; note = 2'-O-methylguanosine-3'- phosphorothioate
  modified_base 23: mod_base = OTHER; note = 2'-O-methyluridine-3'-phosphate
ttttgtttcacaaacaagctggt

SEQ ID NO: 594 - RNA, 23 nt, synthetic construct
  source 1..23: mol_type = other RNA; note = Description of Artificial Sequence: Synthetic oligonucleotide
  modified_base 1: mod_base = OTHER; note = 2'-O-methyluridine-3'-phosphorothioate
  modified_base 2: mod_base = OTHER; note = 2'-fluorouridine -3'-phosphorothioate
  modified_base 3: mod_base = OTHER; note = 2'-O-methyladenosine-3'-phosphate
  modified_base 4: mod_base = OTHER; note = 2'-fluoroadenosine-3'-phosphate
  modified_base 5: mod_base = OTHER; note = 2'-O-methyladenosine-3'-phosphate
  modified_base 6: mod_base = OTHER; note = 2'-fluoroadenosine-3'-phosphate
  modified_base 7: mod_base = OTHER; note = 2'-O-methylcytidine-3'-phosphate
  modified_base 8: mod_base = OTHER; note = 2'-fluorocytidine-3'-phosphate
  modified_base 9: mod_base = OTHER; note = 2'-O-methylcytidine-3'-phosphate
  modified_base 10: mod_base = OTHER; note = 2'-fluoroadenosine-3'-phosphate
  modified_base 11: mod_base = OTHER; note = 2'-O-methyladenosine-3'-phosphate
  modified_base 12: mod_base = OTHER; note = 2'-O-methyluridine-3'-phosphate
  modified_base 13: mod_base = OTHER; note = 2'-O-methyluridine-3'-phosphate
  modified_base 14: mod_base = OTHER; note = 2'-fluorouridine-3'-phosphate
  modified_base 15: mod_base = OTHER; note = 2'-O-methyluridine-3'-phosphate
  modified_base 16: mod_base = OTHER; note = 2'-fluorouridine-3'-phosphate
  modified_base 17: mod_base = OTHER; note = 2'-O-methylguanosine-3'-phosphate
  modified_base 18: mod_base = OTHER; note = 2'-fluorouridine-3'-phosphate
  modified_base 19: mod_base = OTHER; note = 2'-O-methyluridine-3'-phosphate
  modified_base 20: mod_base = OTHER; note = 2'-fluorocytidine-3'-phosphate
  modified_base 21: mod_base = OTHER; note = 2'-O-methyluridine-3'-phosphorothioate
  modified_base 22: mod_base = OTHER; note = 2'-O-methylcytidine-3'- phosphorothioate
  modified_base 23: mod_base = OTHER; note = 2'-O-methyladenosine-3'-phosphate
ttaaaacccaatttttgttctca

SEQ ID NO: 595 - RNA, 23 nt, synthetic construct
  source 1..23: mol_type = other RNA; note = Description of Artificial Sequence: Synthetic oligonucleotide
  modified_base 1: mod_base = OTHER; note = 2'-O-methyladenosine-3'- phosphorothioate
  modified_base 2: mod_base = OTHER; note = 2'-fluoroguanosine-3'-phosphorothioate
  modified_base 3: mod_base = OTHER; note = 2'-O-methyluridine-3'-phosphate
  modified_base 4: mod_base = OTHER; note = 2'-fluorouridine-3'-phosphate
  modified_base 5: mod_base = OTHER; note = 2'-O-methylguanosine-3'-phosphate
  modified_base 6: mod_base = OTHER; note = 2'-fluoroadenosine-3'-phosphate
  modified_base 7: mod_base = OTHER; note = 2'-O-methylguanosine-3'-phosphate
  modified_base 8: mod_base = OTHER; note = 2'-fluoroguanosine-3'-phosphate
  modified_base 9: mod_base = OTHER; note = 2'-O-methylguanosine-3'-phosphate
  modified_base 10: mod_base = OTHER; note = 2'-fluoroadenosine-3'-phosphate
  modified_base 11: mod_base = OTHER; note = 2'-O-methylguanosine-3'-phosphate
  modified_base 12: mod_base = OTHER; note = 2'-O-methyluridine-3'-phosphate
  modified_base 13: mod_base = OTHER; note = 2'-O-methyluridine-3'-phosphate
  modified_base 14: mod_base = OTHER; note = 2'-fluorouridine-3'-phosphate
  modified_base 15: mod_base = OTHER; note = 2'-O-methyluridine-3'-phosphate
  modified_base 16: mod_base = OTHER; note = 2'-fluoroguanosine-3'-phosphate
  modified_base 17: mod_base = OTHER; note = 2'-O-methylcytidine-3'-phosphate
  modified_base 18: mod_base = OTHER; note = 2'-fluorouridine-3'-phosphate
  modified_base 19: mod_base = OTHER; note = 2'-O-methylguanosine-3'-phosphate
  modified_base 20: mod_base = OTHER; note = 2'-fluoroguanosine-3'-phosphate
  modified_base 21: mod_base = OTHER; note = 2'-O-methyladenosine-3'- phosphorothioate
  modified_base 22: mod_base = OTHER; note = 2'-O-methyladenosine-3'- phosphorothioate
  modified_base 23: mod_base = OTHER; note = 2'-O-methyladenosine-3'-phosphate
agttgagggagttttgctggaaa

SEQ ID NO: 596 - RNA, 23 nt, synthetic construct
  source 1..23: mol_type = other RNA; note = Description of Artificial Sequence: Synthetic oligonucleotide
  modified_base 1: mod_base = OTHER; note = 2'-O-methyluridine-3'-phosphorothioate
  modified_base 2: mod_base = OTHER; note = 2'-fluorocytidine-3'-phosphorothioate
  modified_base 3: mod_base = OTHER; note = 2'-O-methyluridine-3'-phosphate
  modified_base 4: mod_base = OTHER; note = 2'-fluorouridine-3'-phosphate
  modified_base 5: mod_base = OTHER; note = 2'-O-methylcytidine-3'-phosphate
  modified_base 6: mod_base = OTHER; note = 2'-fluoroadenosine-3'-phosphate
  modified_base 7: mod_base = OTHER; note = 2'-O-methyluridine-3'-phosphate
  modified_base 8: mod_base = OTHER; note = 2'-fluorocytidine-3'-phosphate
  modified_base 9: mod_base = OTHER; note = 2'-O-methylcytidine-3'-phosphate
  modified_base 10: mod_base = OTHER; note = 2'-fluoroadenosine-3'-phosphate
  modified_base 11: mod_base = OTHER; note = 2'-O-methylguanosine-3'-phosphate
  modified_base 12: mod_base = OTHER; note = 2'-O-methyluridine-3'-phosphate
  modified_base 13: mod_base = OTHER; note = 2'-O-methyluridine-3'-phosphate
  modified_base 14: mod_base = OTHER; note = 2'-fluoroguanosine-3'-phosphate
  modified_base 15: mod_base = OTHER; note = 2'-O-methyladenosine-3'-phosphate
  modified_base 16: mod_base = OTHER; note = 2'-fluoroguanosine-3'-phosphate
  modified_base 17: mod_base = OTHER; note = 2'-O-methylguanosine-3'-phosphate
  modified_base 18: mod_base = OTHER; note = 2'-fluoroguanosine-3'-phosphate
  modified_base 19: mod_base = OTHER; note = 2'-O-methyladenosine-3'-phosphate
  modified_base 20: mod_base = OTHER; note = 2'-fluoroguanosine-3'-phosphate
  modified_base 21: mod_base = OTHER; note = 2'-O-methyluridine-3'-phosphorothioate
  modified_base 22: mod_base = OTHER; note = 2'-O-methyluridine-3'-phosphorothioate
  modified_base 23: mod_base = OTHER; note = 2'-O-methyluridine-3'-phosphate
tcttcatccagttgagggagttt

SEQ ID NO: 597 - RNA, 23 nt, synthetic construct
  source 1..23: mol_type = other RNA; note = Description of Artificial Sequence: Synthetic oligonucleotide
  modified_base 1: mod_base = OTHER; note = 2'-O-methyluridine-3'-phosphorothioate
  modified_base 2: mod_base = OTHER; note = 2'-fluorocytidine-3'-phosphorothioate
  modified_base 3: mod_base = OTHER; note = 2'-O-methyladenosine-3'-phosphate
  modified_base 4: mod_base = OTHER; note = 2'-fluorouridine-3'-phosphate
  modified_base 5: mod_base = OTHER; note = 2'-O-methylguanosine-3'-phosphate
  modified_base 6: mod_base = OTHER; note = 2'-fluorouridine-3'-phosphate
  modified_base 7: mod_base = OTHER; note = 2'-O-methyluridine-3'-phosphate
  modified_base 8: mod_base = OTHER; note = 2'-fluorocytidine-3'-phosphate
  modified_base 9: mod_base = OTHER; note = 2'-O-methyluridine-3'-phosphate
  modified_base 10: mod_base = OTHER; note = 2'-fluorouridine-3'-phosphate
  modified_base 11: mod_base = OTHER; note = 2'-O-methyladenosine-3'-phosphate
  modified_base 12: mod_base = OTHER; note = 2'-O-methylcytidine-3'-phosphate
  modified_base 13: mod_base = OTHER; note = 2'-O-methyladenosine-3'-phosphate
  modified_base 14: mod_base = OTHER; note = 2'-fluorouridine-3'-phosphate
  modified_base 15: mod_base = OTHER; note = 2'-O-methyluridine-3'-phosphate
  modified_base 16: mod_base = OTHER; note = 2'-fluorocytidine-3'-phosphate
  modified_base 17: mod_base = OTHER; note = 2'-O-methyladenosine-3'-phosphate
  modified_base 18: mod_base = OTHER; note = 2'-fluoroadenosine-3'-phosphate
  modified_base 19: mod_base = OTHER; note = 2'-O-methylguanosine-3'-phosphate
  modified_base 20: mod_base = OTHER; note = 2'-fluoroadenosine-3'-phosphate
  modified_base 21: mod_base = OTHER; note = 2'-O-methylcytidine-3'- phosphorothioate
  modified_base 22: mod_base = OTHER; note = 2'-O-methyladenosine-3'- phosphorothioate
  modified_base 23: mod_base = OTHER; note = 2'-O-methylcytidine-3'-phosphate
tcatgttcttacattcaagacac

SEQ ID NO: 598 - RNA, 23 nt, synthetic construct
  source 1..23: mol_type = other RNA; note = Description of Artificial Sequence: Synthetic oligonucleotide
  modified_base 1: mod_base = OTHER; note = 2'-O-methyluridine-3'-phosphorothioate
  modified_base 2: mod_base = OTHER; note = 2'-fluoroadenosine-3'-phosphorothioate
  modified_base 3: mod_base = OTHER; note = 2'-O-methyluridine-3'-phosphate
  modified_base 4: mod_base = OTHER; note = 2'-fluoroadenosine-3'-phosphate
  modified_base 5: mod_base = OTHER; note = 2'-O-methylcytidine-3'-phosphate
  modified_base 6: mod_base = OTHER; note = 2'-fluoroguanosine-3'-phosphate
  modified_base 7: mod_base = OTHER; note = 2'-O-methylguanosine-3'-phosphate
  modified_base 8: mod_base = OTHER; note = 2'-fluoroadenosine-3'-phosphate
  modified_base 9: mod_base = OTHER; note = 2'-O-methyladenosine-3'-phosphate
  modified_base 10: mod_base = OTHER; note = 2'-fluoroguanosine-3'-phosphate
  modified_base 11: mod_base = OTHER; note = 2'-O-methylcytidine-3'-phosphate
  modified_base 12: mod_base = OTHER; note = 2'-O-methylcytidine-3'-phosphate
  modified_base 13: mod_base = OTHER; note = 2'-O-methylcytidine-3'-phosphate
  modified_base 14: mod_base = OTHER; note = 2'-fluoroadenosine-3'-phosphate
  modified_base 15: mod_base = OTHER; note = 2'-O-methyladenosine-3'-phosphate
  modified_base 16: mod_base = OTHER; note = 2'-fluoroguanosine-3'-phosphate
  modified_base 17: mod_base = OTHER; note = 2'-O-methyladenosine-3'-phosphate
  modified_base 18: mod_base = OTHER; note = 2'-fluoroadenosine-3'-phosphate
  modified_base 19: mod_base = OTHER; note = 2'-O-methylguanosine-3'-phosphate
  modified_base 20: mod_base = OTHER; note = 2'-fluorouridine-3'-phosphate
  modified_base 21: mod_base = OTHER; note = 2'-O-methyluridine-3'-phosphorothioate
  modified_base 22: mod_base = OTHER; note = 2'-O-methylguanosine-3'- phosphorothioate
  modified_base 23: mod_base = OTHER; note = 2'-O-methylguanosine-3'-phosphate
tatacggaagcccaagaagttgg

SEQ ID NO: 599 - RNA, 23 nt, synthetic construct
  source 1..23: mol_type = other RNA; note = Description of Artificial Sequence: Synthetic oligonucleotide
  modified_base 1: mod_base = OTHER; note = 2'-O-methyluridine-3'-phosphorothioate
  modified_base 2: mod_base = OTHER; note = 2'-fluorouridine -3'-phosphorothioate
  modified_base 3: mod_base = OTHER; note = 2'-O-methylguanosine-3'-phosphate
  modified_base 4: mod_base = OTHER; note = 2'-fluoroadenosine-3'-phosphate
  modified_base 5: mod_base = OTHER; note = 2'-O-methyladenosine-3'-phosphate
  modified_base 6: mod_base = OTHER; note = 2'-fluoroadenosine-3'-phosphate
  modified_base 7: mod_base = OTHER; note = 2'-O-methyladenosine-3'-phosphate
  modified_base 8: mod_base = OTHER; note = 2'-fluoroguanosine-3'-phosphate
  modified_base 9: mod_base = OTHER; note = 2'-O-methylguanosine-3'-phosphate
  modified_base 10: mod_base = OTHER; note = 2'-fluoroguanosine-3'-phosphate
  modified_base 11: mod_base = OTHER; note = 2'-O-methyladenosine-3'-phosphate
  modified_base 12: mod_base = OTHER; note = 2'-O-methyladenosine-3'-phosphate
  modified_base 13: mod_base = OTHER; note = 2'-O-methylcytidine-3'-phosphate
  modified_base 14: mod_base = OTHER; note = 2'-fluoroadenosine-3'-phosphate
  modified_base 15: mod_base = OTHER; note = 2'-O-methylcytidine-3'-phosphate
  modified_base 16: mod_base = OTHER; note = 2'-fluorouridine-3'-phosphate
  modified_base 17: mod_base = OTHER; note = 2'-O-methyluridine-3'-phosphate
  modified_base 18: mod_base = OTHER; note = 2'-fluorouridine-3'-phosphate
  modified_base 19: mod_base = OTHER; note = 2'-O-methyluridine-3'-phosphate
  modified_base 20: mod_base = OTHER; note = 2'-fluorouridine-3'-phosphate
  modified_base 21: mod_base = OTHER; note = 2'-O-methyluridine-3'-phosphorothioate
  modified_base 22: mod_base = OTHER; note = 2'-O-methylguanosine-3'- phosphorothioate
  modified_base 23: mod_base = OTHER; note = 2'-O-methyluridine-3'-phosphate
ttgaaaagggaacacttttttgt

SEQ ID NO: 600 - RNA, 23 nt, synthetic construct
  source 1..23: mol_type = other RNA; note = Description of Artificial Sequence: Synthetic oligonucleotide
  modified_base 1: mod_base = OTHER; note = 2'-O-methyluridine-3'-phosphorothioate
  modified_base 2: mod_base = OTHER; note = 2'-fluorouridine -3'-phosphorothioate
  modified_base 3: mod_base = OTHER; note = 2'-O-methylcytidine-3'-phosphate
  modified_base 4: mod_base = OTHER; note = 2'-fluoroadenosine-3'-phosphate
  modified_base 5: mod_base = OTHER; note = 2'-O-methyluridine-3'-phosphate
  modified_base 6: mod_base = OTHER; note = 2'-fluorouridine-3'-phosphate
  modified_base 7: mod_base = OTHER; note = 2'-O-methyladenosine-3'-phosphate
  modified_base 8: mod_base = OTHER; note = 2'-fluoroguanosine-3'-phosphate
  modified_base 9: mod_base = OTHER; note = 2'-O-methyladenosine-3'-phosphate
  modified_base 10: mod_base = OTHER; note = 2'-fluoroadenosine-3'-phosphate
  modified_base 11: mod_base = OTHER; note = 2'-O-methylguanosine-3'-phosphate
  modified_base 12: mod_base = OTHER; note = 2'-O-methyladenosine-3'-phosphate
  modified_base 13: mod_base = OTHER; note = 2'-O-methyladenosine-3'-phosphate
  modified_base 14: mod_base = OTHER; note = 2'-fluoroadenosine-3'-phosphate
  modified_base 15: mod_base = OTHER; note = 2'-O-methyladenosine-3'-phosphate
  modified_base 16: mod_base = OTHER; note = 2'-fluoroguanosine-3'-phosphate
  modified_base 17: mod_base = OTHER; note = 2'-O-methylguanosine-3'-phosphate
  modified_base 18: mod_base = OTHER; note = 2'-fluorouridine-3'-phosphate
  modified_base 19: mod_base = OTHER; note = 2'-O-methylguanosine-3'-phosphate
  modified_base 20: mod_base = OTHER; note = 2'-fluoroguanosine-3'-phosphate
  modified_base 21: mod_base = OTHER; note = 2'-O-methylguanosine-3'- phosphorothioate
  modified_base 22: mod_base = OTHER; note = 2'-O-methyladenosine-3'- phosphorothioate
  modified_base 23: mod_base = OTHER; note = 2'-O-methylguanosine-3'-phosphate
ttcattagaagaaaaggtgggag

SEQ ID NO: 601 - RNA, 23 nt, synthetic construct
  source 1..23: mol_type = other RNA; note = Description of Artificial Sequence: Synthetic oligonucleotide
  modified_base 1: mod_base = OTHER; note = 2'-O-methyladenosine-3'- phosphorothioate
  modified_base 2: mod_base = OTHER; note = 2'-fluoroguanosine-3'-phosphorothioate
  modified_base 3: mod_base = OTHER; note = 2'-O-methyluridine-3'-phosphate
  modified_base 4: mod_base = OTHER; note = 2'-fluoroguanosine-3'-phosphate
  modified_base 5: mod_base = OTHER; note = 2'-O-methyladenosine-3'-phosphate
  modified_base 6: mod_base = OTHER; note = 2'-fluoroguanosine-3'-phosphate
  modified_base 7: mod_base = OTHER; note = 2'-O-methyladenosine-3'-phosphate
  modified_base 8: mod_base = OTHER; note = 2'-fluorocytidine-3'-phosphate
  modified_base 9: mod_base = OTHER; note = 2'-O-methylcytidine-3'-phosphate
  modified_base 10: mod_base = OTHER; note = 2'-fluorocytidine-3'-phosphate
  modified_base 11: mod_base = OTHER; note = 2'-O-methyluridine-3'-phosphate
  modified_base 12: mod_base = OTHER; note = 2'-O-methylcytidine-3'-phosphate
  modified_base 13: mod_base = OTHER; note = 2'-O-methylcytidine-3'-phosphate
  modified_base 14: mod_base = OTHER; note = 2'-fluoroadenosine-3'-phosphate
  modified_base 15: mod_base = OTHER; note = 2'-O-methylcytidine-3'-phosphate
  modified_base 16: mod_base = OTHER; note = 2'-fluorocytidine-3'-phosphate
  modified_base 17: mod_base = OTHER; note = 2'-O-methyluridine-3'-phosphate
  modified_base 18: mod_base = OTHER; note = 2'-fluorouridine-3'-phosphate
  modified_base 19: mod_base = OTHER; note = 2'-O-methylguanosine-3'-phosphate
  modified_base 20: mod_base = OTHER; note = 2'-fluorouridine-3'-phosphate
  modified_base 21: mod_base = OTHER; note = 2'-O-methylcytidine-3'- phosphorothioate
  modified_base 22: mod_base = OTHER; note = 2'-O-methylcytidine-3'- phosphorothioate
  modified_base 23: mod_base = OTHER; note = 2'-O-methyladenosine-3'-phosphate
agtgagaccctccaccttgtcca

SEQ ID NO: 602 - RNA, 23 nt, synthetic construct
  source 1..23: mol_type = other RNA; note = Description of Artificial Sequence: Synthetic oligonucleotide
  modified_base 1: mod_base = OTHER; note = 2'-O-methyluridine-3'-phosphorothioate
  modified_base 2: mod_base = OTHER; note = 2'-fluorouridine -3'-phosphorothioate
  modified_base 3: mod_base = OTHER; note = 2'-O-methylguanosine-3'-phosphate
  modified_base 4: mod_base = OTHER; note = 2'-fluorocytidine-3'-phosphate
  modified_base 5: mod_base = OTHER; note = 2'-O-methyladenosine-3'-phosphate
  modified_base 6: mod_base = OTHER; note = 2'-fluorouridine-3'-phosphate
  modified_base 7: mod_base = OTHER; note = 2'-O-methylguanosine-3'-phosphate
  modified_base 8: mod_base = OTHER; note = 2'-fluorocytidine-3'-phosphate
  modified_base 9: mod_base = OTHER; note = 2'-O-methylcytidine-3'-phosphate
  modified_base 10: mod_base = OTHER; note = 2'-fluoroadenosine-3'-phosphate
  modified_base 11: mod_base = OTHER; note = 2'-O-methyluridine-3'-phosphate
  modified_base 12: mod_base = OTHER; note = 2'-O-methyladenosine-3'-phosphate
  modified_base 13: mod_base = OTHER; note = 2'-O-methyluridine-3'-phosphate
  modified_base 14: mod_base = OTHER; note = 2'-fluoroadenosine-3'-phosphate
  modified_base 15: mod_base = OTHER; note = 2'-O-methyluridine-3'-phosphate
  modified_base 16: mod_base = OTHER; note = 2'-fluoroadenosine-3'-phosphate
  modified_base 17: mod_base = OTHER; note = 2'-O-methylcytidine-3'-phosphate
  modified_base 18: mod_base = OTHER; note = 2'-fluoroguanosine-3'-phosphate
  modified_base 19: mod_base = OTHER; note = 2'-O-methylguanosine-3'-phosphate
  modified_base 20: mod_base = OTHER; note = 2'-fluoroadenosine-3'-phosphate
  modified_base 21: mod_base = OTHER; note = 2'-O-methyladenosine-3'- phosphorothioate
  modified_base 22: mod_base = OTHER; note = 2'-O-methylguanosine-3'- phosphorothioate
  modified_base 23: mod_base = OTHER; note = 2'-O-methylcytidine-3'-phosphate
ttgcatgccatatatacggaagc

SEQ ID NO: 603 - RNA, 23 nt, synthetic construct
  source 1..23: mol_type = other RNA; note = Description of Artificial Sequence: Synthetic oligonucleotide
  modified_base 1: mod_base = OTHER; note = 2'-O-methyluridine-3'-phosphorothioate
  modified_base 2: mod_base = OTHER; note = 2'-fluorouridine -3'-phosphorothioate
  modified_base 3: mod_base = OTHER; note = 2'-O-methyluridine-3'-phosphate
  modified_base 4: mod_base = OTHER; note = 2'-fluoroadenosine-3'-phosphate
  modified_base 5: mod_base = OTHER; note = 2'-O-methyladenosine-3'-phosphate
  modified_base 6: mod_base = OTHER; note = 2'-fluoroadenosine-3'-phosphate
  modified_base 7: mod_base = OTHER; note = 2'-O-methyladenosine-3'-phosphate
  modified_base 8: mod_base = OTHER; note = 2'-fluorocytidine-3'-phosphate
  modified_base 9: mod_base = OTHER; note = 2'-O-methylcytidine-3'-phosphate
  modified_base 10: mod_base = OTHER; note = 2'-fluorocytidine-3'-phosphate
  modified_base 11: mod_base = OTHER; note = 2'-O-methyladenosine-3'-phosphate
  modified_base 12: mod_base = OTHER; note = 2'-O-methyladenosine-3'-phosphate
  modified_base 13: mod_base = OTHER; note = 2'-O-methyluridine-3'-phosphate
  modified_base 14: mod_base = OTHER; note = 2'-fluorouridine-3'-phosphate
  modified_base 15: mod_base = OTHER; note = 2'-O-methyluridine-3'-phosphate
  modified_base 16: mod_base = OTHER; note = 2'-fluorouridine-3'-phosphate
  modified_base 17: mod_base = OTHER; note = 2'-O-methyluridine-3'-phosphate
  modified_base 18: mod_base = OTHER; note = 2'-fluoroguanosine-3'-phosphate
  modified_base 19: mod_base = OTHER; note = 2'-O-methyluridine-3'-phosphate
  modified_base 20: mod_base = OTHER; note = 2'-fluorouridine-3'-phosphate
  modified_base 21: mod_base = OTHER; note = 2'-O-methylcytidine-3'- phosphorothioate
  modified_base 22: mod_base = OTHER; note = 2'-O-methyluridine-3'-phosphorothioate
  modified_base 23: mod_base = OTHER; note = 2'-O-methylcytidine-3'-phosphate
tttaaaacccaatttttgttctc

SEQ ID NO: 604 - RNA, 23 nt, synthetic construct
  source 1..23: mol_type = other RNA; note = Description of Artificial Sequence: Synthetic oligonucleotide
  modified_base 1: mod_base = OTHER; note = 2'-O-methyluridine-3'-phosphorothioate
  modified_base 2: mod_base = OTHER; note = 2'-fluorouridine -3'-phosphorothioate
  modified_base 3: mod_base = OTHER; note = 2'-O-methyluridine-3'-phosphate
  modified_base 4: mod_base = OTHER; note = 2'-fluoroguanosine-3'-phosphate
  modified_base 5: mod_base = OTHER; note = 2'-O-methyladenosine-3'-phosphate
  modified_base 6: mod_base = OTHER; note = 2'-fluorouridine-3'-phosphate
  modified_base 7: mod_base = OTHER; note = 2'-O-methylcytidine-3'-phosphate
  modified_base 8: mod_base = OTHER; note = 2'-fluoroadenosine-3'-phosphate
  modified_base 9: mod_base = OTHER; note = 2'-O-methyluridine-3'-phosphate
  modified_base 10: mod_base = OTHER; note = 2'-fluoroadenosine-3'-phosphate
  modified_base 11: mod_base = OTHER; note = 2'-O-methylcytidine-3'-phosphate
  modified_base 12: mod_base = OTHER; note = 2'-O-methyladenosine-3'-phosphate
  modified_base 13: mod_base = OTHER; note = 2'-O-methylcytidine-3'-phosphate
  modified_base 14: mod_base = OTHER; note = 2'-fluoroadenosine-3'-phosphate
  modified_base 15: mod_base = OTHER; note = 2'-O-methylguanosine-3'-phosphate
  modified_base 16: mod_base = OTHER; note = 2'-fluorocytidine-3'-phosphate
  modified_base 17: mod_base = OTHER; note = 2'-O-methyladenosine-3'-phosphate
  modified_base 18: mod_base = OTHER; note = 2'-fluoroadenosine-3'-phosphate
  modified_base 19: mod_base = OTHER; note = 2'-O-methyladenosine-3'-phosphate
  modified_base 20: mod_base = OTHER; note = 2'-fluorocytidine-3'-phosphate
  modified_base 21: mod_base = OTHER; note = 2'-O-methyladenosine-3'- phosphorothioate
  modified_base 22: mod_base = OTHER; note = 2'-O-methylguanosine-3'- phosphorothioate
  modified_base 23: mod_base = OTHER; note = 2'-O-methylguanosine-3'-phosphate
tttgatcatacacagcaaacagg

SEQ ID NO: 605 - RNA, 23 nt, synthetic construct
  source 1..23: mol_type = other RNA; note = Description of Artificial Sequence: Synthetic oligonucleotide
  modified_base 1: mod_base = OTHER; note = 2'-O-methyluridine-3'-phosphorothioate
  modified_base 2: mod_base = OTHER; note = 2'-fluorocytidine-3'-phosphorothioate
  modified_base 3: mod_base = OTHER; note = 2'-O-methyluridine-3'-phosphate
  modified_base 4: mod_base = OTHER; note = 2'-fluorocytidine-3'-phosphate
  modified_base 5: mod_base = OTHER; note = 2'-O-methyladenosine-3'-phosphate
  modified_base 6: mod_base = OTHER; note = 2'-fluoroadenosine-3'-phosphate
  modified_base 7: mod_base = OTHER; note = 2'-O-methyluridine-3'-phosphate
  modified_base 8: mod_base = OTHER; note = 2'-fluorouridine-3'-phosphate
  modified_base 9: mod_base = OTHER; note = 2'-O-methyluridine-3'-phosphate
  modified_base 10: mod_base = OTHER; note = 2'-fluorouridine-3'-phosphate
  modified_base 11: mod_base = OTHER; note = 2'-O-methyluridine-3'-phosphate
  modified_base 12: mod_base = OTHER; note = 2'-O-methylguanosine-3'-phosphate
  modified_base 13: mod_base = OTHER; note = 2'-O-methylcytidine-3'-phosphate
  modified_base 14: mod_base = OTHER; note = 2'-fluoroadenosine-3'-phosphate
  modified_base 15: mod_base = OTHER; note = 2'-O-methylguanosine-3'-phosphate
  modified_base 16: mod_base = OTHER; note = 2'-fluoroguanosine-3'-phosphate
  modified_base 17: mod_base = OTHER; note = 2'-O-methyluridine-3'-phosphate
  modified_base 18: mod_base = OTHER; note = 2'-fluorouridine-3'-phosphate
  modified_base 19: mod_base = OTHER; note = 2'-O-methylcytidine-3'-phosphate
  modified_base 20: mod_base = OTHER; note = 2'-fluoroadenosine-3'-phosphate
  modified_base 21: mod_base = OTHER; note = 2'-O-methylguanosine-3'- phosphorothioate
  modified_base 22: mod_base = OTHER; note = 2'-O-methylcytidine-3'- phosphorothioate
  modified_base 23: mod_base = OTHER; note = 2'-O-methyluridine-3'-phosphate
tctcaatttttgcaggttcagct

SEQ ID NO: 606 - RNA, 23 nt, synthetic construct
  source 1..23: mol_type = other RNA; note = Description of Artificial Sequence: Synthetic oligonucleotide
  modified_base 1: mod_base = OTHER; note = 2'-O-methyladenosine-3'- phosphorothioate
  modified_base 2: mod_base = OTHER; note = 2'-fluoroadenosine-3'-phosphorothioate
  modified_base 3: mod_base = OTHER; note = 2'-O-methyladenosine-3'-phosphate
  modified_base 4: mod_base = OTHER; note = 2'-fluorocytidine-3'-phosphate
  modified_base 5: mod_base = OTHER; note = 2'-O-methyladenosine-3'-phosphate
  modified_base 6: mod_base = OTHER; note = 2'-fluoroadenosine-3'-phosphate
  modified_base 7: mod_base = OTHER; note = 2'-O-methylguanosine-3'-phosphate
  modified_base 8: mod_base = OTHER; note = 2'-fluorocytidine-3'-phosphate
  modified_base 9: mod_base = OTHER; note = 2'-O-methyluridine-3'-phosphate
  modified_base 10: mod_base = OTHER; note = 2'-fluoroguanosine-3'-phosphate
  modified_base 11: mod_base = OTHER; note = 2'-O-methylguanosine-3'-phosphate
  modified_base 12: mod_base = OTHER; note = 2'-O-methyluridine-3'-phosphate
  modified_base 13: mod_base = OTHER; note = 2'-O-methylcytidine-3'-phosphate
  modified_base 14: mod_base = OTHER; note = 2'-fluoroguanosine-3'-phosphate
  modified_base 15: mod_base = OTHER; note = 2'-O-methylguanosine-3'-phosphate
  modified_base 16: mod_base = OTHER; note = 2'-fluorouridine-3'-phosphate
  modified_base 17: mod_base = OTHER; note = 2'-O-methyluridine-3'-phosphate
  modified_base 18: mod_base = OTHER; note = 2'-fluoroguanosine-3'-phosphate
  modified_base 19: mod_base = OTHER; note = 2'-O-methylguanosine-3'-phosphate
  modified_base 20: mod_base = OTHER; note = 2'-fluoroadenosine-3'-phosphate
  modified_base 21: mod_base = OTHER; note = 2'-O-methyladenosine-3'- phosphorothioate
  modified_base 22: mod_base = OTHER; note = 2'-O-methyluridine-3'-phosphorothioate
  modified_base 23: mod_base = OTHER; note = 2'-O-methyluridine-3'-phosphate
aaacaagctggtcggttggaatt

SEQ ID NO: 607 - RNA, 23 nt, synthetic construct
  source 1..23: mol_type = other RNA; note = Description of Artificial Sequence: Synthetic oligonucleotide
  modified_base 1: mod_base = OTHER; note = 2'-O-methyladenosine-3'- phosphorothioate
  modified_base 2: mod_base = OTHER; note = 2'-fluorouridine -3'-phosphorothioate
  modified_base 3: mod_base = OTHER; note = 2'-O-methyluridine-3'-phosphate
  modified_base 4: mod_base = OTHER; note = 2'-fluoroadenosine-3'-phosphate
  modified_base 5: mod_base = OTHER; note = 2'-O-methylguanosine-3'-phosphate
  modified_base 6: mod_base = OTHER; note = 2'-fluoroadenosine-3'-phosphate
  modified_base 7: mod_base = OTHER; note = 2'-O-methyladenosine-3'-phosphate
  modified_base 8: mod_base = OTHER; note = 2'-fluoroguanosine-3'-phosphate
  modified_base 9: mod_base = OTHER; note = 2'-O-methyladenosine-3'-phosphate
  modified_base 10: mod_base = OTHER; note = 2'-fluoroadenosine-3'-phosphate
  modified_base 11: mod_base = OTHER; note = 2'-O-methyladenosine-3'-phosphate
  modified_base 12: mod_base = OTHER; note = 2'-O-methyladenosine-3'-phosphate
  modified_base 13: mod_base = OTHER; note = 2'-O-methylguanosine-3'-phosphate
  modified_base 14: mod_base = OTHER; note = 2'-fluoroguanosine-3'-phosphate
  modified_base 15: mod_base = OTHER; note = 2'-O-methyluridine-3'-phosphate
  modified_base 16: mod_base = OTHER; note = 2'-fluoroguanosine-3'-phosphate
  modified_base 17: mod_base = OTHER; note = 2'-O-methylguanosine-3'-phosphate
  modified_base 18: mod_base = OTHER; note = 2'-fluoroguanosine-3'-phosphate
  modified_base 19: mod_base = OTHER; note = 2'-O-methyladenosine-3'-phosphate
  modified_base 20: mod_base = OTHER; note = 2'-fluoroguanosine-3'-phosphate
  modified_base 21: mod_base = OTHER; note = 2'-O-methyladenosine-3'- phosphorothioate
  modified_base 22: mod_base = OTHER; note = 2'-O-methylcytidine-3'- phosphorothioate
  modified_base 23: mod_base = OTHER; note = 2'-O-methyluridine-3'-phosphate
attagaagaaaaggtgggagact

SEQ ID NO: 608 - RNA, 23 nt, synthetic construct
  source 1..23: mol_type = other RNA; note = Description of Artificial Sequence: Synthetic oligonucleotide
  modified_base 1: mod_base = OTHER; note = 2'-O-methyluridine-3'-phosphorothioate
  modified_base 2: mod_base = OTHER; note = 2'-fluoroadenosine-3'-phosphorothioate
  modified_base 3: mod_base = OTHER; note = 2'-O-methyluridine-3'-phosphate
  modified_base 4: mod_base = OTHER; note = 2'-fluorouridine-3'-phosphate
  modified_base 5: mod_base = OTHER; note = 2'-O-methylguanosine-3'-phosphate
  modified_base 6: mod_base = OTHER; note = 2'-fluorocytidine-3'-phosphate
  modified_base 7: mod_base = OTHER; note = 2'-O-methyluridine-3'-phosphate
  modified_base 8: mod_base = OTHER; note = 2'-fluorocytidine-3'-phosphate
  modified_base 9: mod_base = OTHER; note = 2'-O-methyladenosine-3'-phosphate
  modified_base 10: mod_base = OTHER; note = 2'-fluoroadenosine-3'-phosphate
  modified_base 11: mod_base = OTHER; note = 2'-O-methyluridine-3'-phosphate
  modified_base 12: mod_base = OTHER; note = 2'-O-methyluridine-3'-phosphate
  modified_base 13: mod_base = OTHER; note = 2'-O-methyluridine-3'-phosphate
  modified_base 14: mod_base = OTHER; note = 2'-fluorouridine-3'-phosphate
  modified_base 15: mod_base = OTHER; note = 2'-O-methyluridine-3'-phosphate
  modified_base 16: mod_base = OTHER; note = 2'-fluoroguanosine-3'-phosphate
  modified_base 17: mod_base = OTHER; note = 2'-O-methylcytidine-3'-phosphate
  modified_base 18: mod_base = OTHER; note = 2'-fluoroadenosine-3'-phosphate
  modified_base 19: mod_base = OTHER; note = 2'-O-methylguanosine-3'-phosphate
  modified_base 20: mod_base = OTHER; note = 2'-fluoroguanosine-3'-phosphate
  modified_base 21: mod_base = OTHER; note = 2'-O-methyluridine-3'-phosphorothioate
  modified_base 22: mod_base = OTHER; note = 2'-O-methyluridine-3'-phosphorothioate
  modified_base 23: mod_base = OTHER; note = 2'-O-methylcytidine-3'-phosphate
tattgctcaatttttgcaggttc

SEQ ID NO: 609 - RNA, 23 nt, synthetic construct
  source 1..23: mol_type = other RNA; note = Description of Artificial Sequence: Synthetic oligonucleotide
  modified_base 1: mod_base = OTHER; note = 2'-O-methyluridine-3'-phosphorothioate
  modified_base 2: mod_base = OTHER; note = 2'-fluorouridine -3'-phosphorothioate
  modified_base 3: mod_base = OTHER; note = 2'-O-methylcytidine-3'-phosphate
  modified_base 4: mod_base = OTHER; note = 2'-fluoroadenosine-3'-phosphate
  modified_base 5: mod_base = OTHER; note = 2'-O-methyladenosine-3'-phosphate
  modified_base 6: mod_base = OTHER; note = 2'-fluoroguanosine-3'-phosphate
  modified_base 7: mod_base = OTHER; note = 2'-O-methyladenosine-3'-phosphate
  modified_base 8: mod_base = OTHER; note = 2'-fluorocytidine-3'-phosphate
  modified_base 9: mod_base = OTHER; note = 2'-O-methyladenosine-3'-phosphate
  modified_base 10: mod_base = OTHER; note = 2'-fluorocytidine-3'-phosphate
  modified_base 11: mod_base = OTHER; note = 2'-O-methyluridine-3'-phosphate
  modified_base 12: mod_base = OTHER; note = 2'-O-methyladenosine-3'-phosphate
  modified_base 13: mod_base = OTHER; note = 2'-O-methyladenosine-3'-phosphate
  modified_base 14: mod_base = OTHER; note = 2'-fluoroadenosine-3'-phosphate
  modified_base 15: mod_base = OTHER; note = 2'-O-methyluridine-3'-phosphate
  modified_base 16: mod_base = OTHER; note = 2'-fluoroadenosine-3'-phosphate
  modified_base 17: mod_base = OTHER; note = 2'-O-methylcytidine-3'-phosphate
  modified_base 18: mod_base = OTHER; note = 2'-fluoroadenosine-3'-phosphate
  modified_base 19: mod_base = OTHER; note = 2'-O-methyladenosine-3'-phosphate
  modified_base 20: mod_base = OTHER; note = 2'-fluoroadenosine-3'-phosphate
  modified_base 21: mod_base = OTHER; note = 2'-O-methylcytidine-3'- phosphorothioate
  modified_base 22: mod_base = OTHER; note = 2'-O-methylcytidine-3'- phosphorothioate
  modified_base 23: mod_base = OTHER; note = 2'-O-methylguanosine-3'-phosphate
ttcaagacactaaatacaaaccg

SEQ ID NO: 610 - RNA, 23 nt, synthetic construct
  source 1..23: mol_type = other RNA; note = Description of Artificial Sequence: Synthetic oligonucleotide
  modified_base 1: mod_base = OTHER; note = 2'-O-methyladenosine-3'- phosphorothioate
  modified_base 2: mod_base = OTHER; note = 2'-fluoroadenosine-3'-phosphorothioate
  modified_base 3: mod_base = OTHER; note = 2'-O-methyladenosine-3'-phosphate
  modified_base 4: mod_base = OTHER; note = 2'-fluoroguanosine-3'-phosphate
  modified_base 5: mod_base = OTHER; note = 2'-O-methyladenosine-3'-phosphate
  modified_base 6: mod_base = OTHER; note = 2'-fluorocytidine-3'-phosphate
  modified_base 7: mod_base = OTHER; note = 2'-O-methyladenosine-3'-phosphate
  modified_base 8: mod_base = OTHER; note = 2'-fluoroguanosine-3'-phosphate
  modified_base 9: mod_base = OTHER; note = 2'-O-methylcytidine-3'-phosphate
  modified_base 10: mod_base = OTHER; note = 2'-fluorocytidine-3'-phosphate
  modified_base 11: mod_base = OTHER; note = 2'-O-methylguanosine-3'-phosphate
  modified_base 12: mod_base = OTHER; note = 2'-O-methyluridine-3'-phosphate
  modified_base 13: mod_base = OTHER; note = 2'-O-methyluridine-3'-phosphate
  modified_base 14: mod_base = OTHER; note = 2'-fluoroguanosine-3'-phosphate
  modified_base 15: mod_base = OTHER; note = 2'-O-methylguanosine-3'-phosphate
  modified_base 16: mod_base = OTHER; note = 2'-fluoroguanosine-3'-phosphate
  modified_base 17: mod_base = OTHER; note = 2'-O-methylguanosine-3'-phosphate
  modified_base 18: mod_base = OTHER; note = 2'-fluoroadenosine-3'-phosphate
  modified_base 19: mod_base = OTHER; note = 2'-O-methylguanosine-3'-phosphate
  modified_base 20: mod_base = OTHER; note = 2'-fluoroadenosine-3'-phosphate
  modified_base 21: mod_base = OTHER; note = 2'-O-methylguanosine-3'- phosphorothioate
  modified_base 22: mod_base = OTHER; note = 2'-O-methylguanosine-3'- phosphorothioate
  modified_base 23: mod_base = OTHER; note = 2'-O-methyladenosine-3'-phosphate
aaagacagccgttggggagagga

SEQ ID NO: 611 - RNA, 23 nt, synthetic construct
  source 1..23: mol_type = other RNA; note = Description of Artificial Sequence: Synthetic oligonucleotide
  modified_base 1: mod_base = OTHER; note = 2'-O-methyluridine-3'-phosphorothioate
  modified_base 2: mod_base = OTHER; note = 2'-fluorouridine -3'-phosphorothioate
  modified_base 3: mod_base = OTHER; note = 2'-O-methylcytidine-3'-phosphate
  modified_base 4: mod_base = OTHER; note = 2'-fluoroadenosine-3'-phosphate
  modified_base 5: mod_base = OTHER; note = 2'-O-methylcytidine-3'-phosphate
  modified_base 6: mod_base = OTHER; note = 2'-fluoroadenosine-3'-phosphate
  modified_base 7: mod_base = OTHER; note = 2'-O-methyladenosine-3'-phosphate
  modified_base 8: mod_base = OTHER; note = 2'-fluoroadenosine-3'-phosphate
  modified_base 9: mod_base = OTHER; note = 2'-O-methylcytidine-3'-phosphate
  modified_base 10: mod_base = OTHER; note = 2'-fluoroadenosine-3'-phosphate
  modified_base 11: mod_base = OTHER; note = 2'-O-methyladenosine-3'-phosphate
  modified_base 12: mod_base = OTHER; note = 2'-O-methylguanosine-3'-phosphate
  modified_base 13: mod_base = OTHER; note = 2'-O-methylcytidine-3'-phosphate
  modified_base 14: mod_base = OTHER; note = 2'-fluorouridine-3'-phosphate
  modified_base 15: mod_base = OTHER; note = 2'-O-methylguanosine-3'-phosphate
  modified_base 16: mod_base = OTHER; note = 2'-fluoroguanosine-3'-phosphate
  modified_base 17: mod_base = OTHER; note = 2'-O-methyluridine-3'-phosphate
  modified_base 18: mod_base = OTHER; note = 2'-fluorocytidine-3'-phosphate
  modified_base 19: mod_base = OTHER; note = 2'-O-methylguanosine-3'-phosphate
  modified_base 20: mod_base = OTHER; note = 2'-fluoroguanosine-3'-phosphate
  modified_base 21: mod_base = OTHER; note = 2'-O-methyluridine-3'-phosphorothioate
  modified_base 22: mod_base = OTHER; note = 2'-O-methyluridine-3'-phosphorothioate
  modified_base 23: mod_base = OTHER; note = 2'-O-methylguanosine-3'-phosphate
ttcacaaacaagctggtcggttg

SEQ ID NO: 612 - RNA, 23 nt, synthetic construct
  source 1..23: mol_type = other RNA; note = Description of Artificial Sequence: Synthetic oligonucleotide
  modified_base 1: mod_base = OTHER; note = 2'-O-methyluridine-3'-phosphorothioate
  modified_base 2: mod_base = OTHER; note = 2'-fluorouridine -3'-phosphorothioate
  modified_base 3: mod_base = OTHER; note = 2'-O-methyluridine-3'-phosphate
  modified_base 4: mod_base = OTHER; note = 2'-fluoroguanosine-3'-phosphate
  modified_base 5: mod_base = OTHER; note = 2'-O-methyluridine-3'-phosphate
  modified_base 6: mod_base = OTHER; note = 2'-fluorouridine-3'-phosphate
  modified_base 7: mod_base = OTHER; note = 2'-O-methyluridine-3'-phosphate
  modified_base 8: mod_base = OTHER; note = 2'-fluorocytidine-3'-phosphate
  modified_base 9: mod_base = OTHER; note = 2'-O-methyladenosine-3'-phosphate
  modified_base 10: mod_base = OTHER; note = 2'-fluorocytidine-3'-phosphate
  modified_base 11: mod_base = OTHER; note = 2'-O-methyladenosine-3'-phosphate
  modified_base 12: mod_base = OTHER; note = 2'-O-methyladenosine-3'-phosphate
  modified_base 13: mod_base = OTHER; note = 2'-O-methyladenosine-3'-phosphate
  modified_base 14: mod_base = OTHER; note = 2'-fluorocytidine-3'-phosphate
  modified_base 15: mod_base = OTHER; note = 2'-O-methyladenosine-3'-phosphate
  modified_base 16: mod_base = OTHER; note = 2'-fluoroadenosine-3'-phosphate
  modified_base 17: mod_base = OTHER; note = 2'-O-methylguanosine-3'-phosphate
  modified_base 18: mod_base = OTHER; note = 2'-fluorocytidine-3'-phosphate
  modified_base 19: mod_base = OTHER; note = 2'-O-methyluridine-3'-phosphate
  modified_base 20: mod_base = OTHER; note = 2'-fluoroguanosine-3'-phosphate
  modified_base 21: mod_base = OTHER; note = 2'-O-methylguanosine-3'- phosphorothioate
  modified_base 22: mod_base = OTHER; note = 2'-O-methyluridine-3'-phosphorothioate
  modified_base 23: mod_base = OTHER; note = 2'-O-methylcytidine-3'-phosphate
tttgtttcacaaacaagctggtc

SEQ ID NO: 613 - RNA, 23 nt, synthetic construct
  source 1..23: mol_type = other RNA; note = Description of Artificial Sequence: Synthetic oligonucleotide
  modified_base 1: mod_base = OTHER; note = 2'-O-methyladenosine-3'- phosphorothioate
  modified_base 2: mod_base = OTHER; note = 2'-fluorouridine -3'-phosphorothioate
  modified_base 3: mod_base = OTHER; note = 2'-O-methyluridine-3'-phosphate
  modified_base 4: mod_base = OTHER; note = 2'-fluorocytidine-3'-phosphate
  modified_base 5: mod_base = OTHER; note = 2'-O-methyladenosine-3'-phosphate
  modified_base 6: mod_base = OTHER; note = 2'-fluoroadenosine-3'-phosphate
  modified_base 7: mod_base = OTHER; note = 2'-O-methylguanosine-3'-phosphate
  modified_base 8: mod_base = OTHER; note = 2'-fluoroadenosine-3'-phosphate
  modified_base 9: mod_base = OTHER; note = 2'-O-methylcytidine-3'-phosphate
  modified_base 10: mod_base = OTHER; note = 2'-fluoroadenosine-3'-phosphate
  modified_base 11: mod_base = OTHER; note = 2'-O-methylcytidine-3'-phosphate
  modified_base 12: mod_base = OTHER; note = 2'-O-methyluridine-3'-phosphate
  modified_base 13: mod_base = OTHER; note = 2'-O-methyladenosine-3'-phosphate
  modified_base 14: mod_base = OTHER; note = 2'-fluoroadenosine-3'-phosphate
  modified_base 15: mod_base = OTHER; note = 2'-O-methyladenosine-3'-phosphate
  modified_base 16: mod_base = OTHER; note = 2'-fluorouridine-3'-phosphate
  modified_base 17: mod_base = OTHER; note = 2'-O-methyladenosine-3'-phosphate
  modified_base 18: mod_base = OTHER; note = 2'-fluorocytidine-3'-phosphate
  modified_base 19: mod_base = OTHER; note = 2'-O-methyladenosine-3'-phosphate
  modified_base 20: mod_base = OTHER; note = 2'-fluoroadenosine-3'-phosphate
  modified_base 21: mod_base = OTHER; note = 2'-O-methyladenosine-3'- phosphorothioate
  modified_base 22: mod_base = OTHER; note = 2'-O-methylcytidine-3'- phosphorothioate
  modified_base 23: mod_base = OTHER; note = 2'-O-methylcytidine-3'-phosphate
attcaagacactaaatacaaacc

SEQ ID NO: 614 - RNA, 23 nt, synthetic construct
  source 1..23: mol_type = other RNA; note = Description of Artificial Sequence: Synthetic oligonucleotide
  modified_base 1: mod_base = OTHER; note = 2'-O-methyladenosine-3'- phosphorothioate
  modified_base 2: mod_base = OTHER; note = 2'-fluorocytidine-3'-phosphorothioate
  modified_base 3: mod_base = OTHER; note = 2'-O-methylcytidine-3'-phosphate
  modified_base 4: mod_base = OTHER; note = 2'-fluorocytidine-3'-phosphate
  modified_base 5: mod_base = OTHER; note = 2'-O-methyladenosine-3'-phosphate
  modified_base 6: mod_base = OTHER; note = 2'-fluoroadenosine-3'-phosphate
  modified_base 7: mod_base = OTHER; note = 2'-O-methyluridine-3'-phosphate
  modified_base 8: mod_base = OTHER; note = 2'-fluorouridine-3'-phosphate
  modified_base 9: mod_base = OTHER; note = 2'-O-methyluridine-3'-phosphate
  modified_base 10: mod_base = OTHER; note = 2'-fluorouridine-3'-phosphate
  modified_base 11: mod_base = OTHER; note = 2'-O-methyluridine-3'-phosphate
  modified_base 12: mod_base = OTHER; note = 2'-O-methylguanosine-3'-phosphate
  modified_base 13: mod_base = OTHER; note = 2'-O-methyluridine-3'-phosphate
  modified_base 14: mod_base = OTHER; note = 2'-fluorouridine-3'-phosphate
  modified_base 15: mod_base = OTHER; note = 2'-O-methylcytidine-3'-phosphate
  modified_base 16: mod_base = OTHER; note = 2'-fluorouridine-3'-phosphate
  modified_base 17: mod_base = OTHER; note = 2'-O-methylcytidine-3'-phosphate
  modified_base 18: mod_base = OTHER; note = 2'-fluoroadenosine-3'-phosphate
  modified_base 19: mod_base = OTHER; note = 2'-O-methyladenosine-3'-phosphate
  modified_base 20: mod_base = OTHER; note = 2'-fluorocytidine-3'-phosphate
  modified_base 21: mod_base = OTHER; note = 2'-O-methyluridine-3'-phosphorothioate
  modified_base 22: mod_base = OTHER; note = 2'-O-methyluridine-3'-phosphorothioate
  modified_base 23: mod_base = OTHER; note = 2'-O-methylguanosine-3'-phosphate
acccaatttttgttctcaacttg

SEQ ID NO: 615 - RNA, 23 nt, synthetic construct
  source 1..23: mol_type = other RNA; note = Description of Artificial Sequence: Synthetic oligonucleotide
  modified_base 1: mod_base = OTHER; note = 2'-O-methyladenosine-3'- phosphorothioate
  modified_base 2: mod_base = OTHER; note = 2'-fluoroadenosine-3'-phosphorothioate
  modified_base 3: mod_base = OTHER; note = 2'-O-methyladenosine-3'-phosphate
  modified_base 4: mod_base = OTHER; note = 2'-fluoroguanosine-3'-phosphate
  modified_base 5: mod_base = OTHER; note = 2'-O-methyluridine-3'-phosphate
  modified_base 6: mod_base = OTHER; note = 2'-fluoroguanosine-3'-phosphate
  modified_base 7: mod_base = OTHER; note = 2'-O-methyladenosine-3'-phosphate
  modified_base 8: mod_base = OTHER; note = 2'-fluoroguanosine-3'-phosphate
  modified_base 9: mod_base = OTHER; note = 2'-O-methyladenosine-3'-phosphate
  modified_base 10: mod_base = OTHER; note = 2'-fluorocytidine-3'-phosphate
  modified_base 11: mod_base = OTHER; note = 2'-O-methylcytidine-3'-phosphate
  modified_base 12: mod_base = OTHER; note = 2'-O-methylcytidine-3'-phosphate
  modified_base 13: mod_base = OTHER; note = 2'-O-methyluridine-3'-phosphate
  modified_base 14: mod_base = OTHER; note = 2'-fluorocytidine-3'-phosphate
  modified_base 15: mod_base = OTHER; note = 2'-O-methylcytidine-3'-phosphate
  modified_base 16: mod_base = OTHER; note = 2'-fluoroadenosine-3'-phosphate
  modified_base 17: mod_base = OTHER; note = 2'-O-methylcytidine-3'-phosphate
  modified_base 18: mod_base = OTHER; note = 2'-fluorocytidine-3'-phosphate
  modified_base 19: mod_base = OTHER; note = 2'-O-methyluridine-3'-phosphate
  modified_base 20: mod_base = OTHER; note = 2'-fluorouridine-3'-phosphate
  modified_base 21: mod_base = OTHER; note = 2'-O-methylguanosine-3'- phosphorothioate
  modified_base 22: mod_base = OTHER; note = 2'-O-methyluridine-3'-phosphorothioate
  modified_base 23: mod_base = OTHER; note = 2'-O-methylcytidine-3'-phosphate
aaagtgagaccctccaccttgtc

SEQ ID NO: 616 - RNA, 23 nt, synthetic construct
  source 1..23: mol_type = other RNA; note = Description of Artificial Sequence: Synthetic oligonucleotide
  modified_base 1: mod_base = OTHER; note = 2'-O-methyladenosine-3'- phosphorothioate
  modified_base 2: mod_base = OTHER; note = 2'-fluoroadenosine-3'-phosphorothioate
  modified_base 3: mod_base = OTHER; note = 2'-O-methyladenosine-3'-phosphate
  modified_base 4: mod_base = OTHER; note = 2'-fluoroguanosine-3'-phosphate
  modified_base 5: mod_base = OTHER; note = 2'-O-methylguanosine-3'-phosphate
  modified_base 6: mod_base = OTHER; note = 2'-fluorouridine-3'-phosphate
  modified_base 7: mod_base = OTHER; note = 2'-O-methylguanosine-3'-phosphate
  modified_base 8: mod_base = OTHER; note = 2'-fluoroguanosine-3'-phosphate
  modified_base 9: mod_base = OTHER; note = 2'-O-methylguanosine-3'-phosphate
  modified_base 10: mod_base = OTHER; note = 2'-fluoroadenosine-3'-phosphate
  modified_base 11: mod_base = OTHER; note = 2'-O-methylguanosine-3'-phosphate
  modified_base 12: mod_base = OTHER; note = 2'-O-methyladenosine-3'-phosphate
  modified_base 13: mod_base = OTHER; note = 2'-O-methylcytidine-3'-phosphate
  modified_base 14: mod_base = OTHER; note = 2'-fluorouridine-3'-phosphate
  modified_base 15: mod_base = OTHER; note = 2'-O-methylguanosine-3'-phosphate
  modified_base 16: mod_base = OTHER; note = 2'-fluoroguanosine-3'-phosphate
  modified_base 17: mod_base = OTHER; note = 2'-O-methylguanosine-3'-phosphate
  modified_base 18: mod_base = OTHER; note = 2'-fluoroguanosine-3'-phosphate
  modified_base 19: mod_base = OTHER; note = 2'-O-methylguanosine-3'-phosphate
  modified_base 20: mod_base = OTHER; note = 2'-fluorouridine-3'-phosphate
  modified_base 21: mod_base = OTHER; note = 2'-O-methylguanosine-3'- phosphorothioate
  modified_base 22: mod_base = OTHER; note = 2'-O-methyladenosine-3'- phosphorothioate
  modified_base 23: mod_base = OTHER; note = 2'-O-methylcytidine-3'-phosphate
aaaggtgggagactgggggtgac

SEQ ID NO: 617 - RNA, 23 nt, synthetic construct
  source 1..23: mol_type = other RNA; note = Description of Artificial Sequence: Synthetic oligonucleotide
  modified_base 1: mod_base = OTHER; note = 2'-O-methyluridine-3'-phosphorothioate
  modified_base 2: mod_base = OTHER; note = 2'-fluorocytidine-3'-phosphorothioate
  modified_base 3: mod_base = OTHER; note = 2'-O-methylcytidine-3'-phosphate
  modified_base 4: mod_base = OTHER; note = 2'-fluoroadenosine-3'-phosphate
  modified_base 5: mod_base = OTHER; note = 2'-O-methyluridine-3'-phosphate
  modified_base 6: mod_base = OTHER; note = 2'-fluorocytidine-3'-phosphate
  modified_base 7: mod_base = OTHER; note = 2'-O-methylcytidine-3'-phosphate
  modified_base 8: mod_base = OTHER; note = 2'-fluorouridine-3'-phosphate
  modified_base 9: mod_base = OTHER; note = 2'-O-methylguanosine-3'-phosphate
  modified_base 10: mod_base = OTHER; note = 2'-fluorouridine-3'-phosphate
  modified_base 11: mod_base = OTHER; note = 2'-O-methylcytidine-3'-phosphate
  modified_base 12: mod_base = OTHER; note = 2'-O-methyladenosine-3'-phosphate
  modified_base 13: mod_base = OTHER; note = 2'-O-methylcytidine-3'-phosphate
  modified_base 14: mod_base = OTHER; note = 2'-fluoroadenosine-3'-phosphate
  modified_base 15: mod_base = OTHER; note = 2'-O-methylguanosine-3'-phosphate
  modified_base 16: mod_base = OTHER; note = 2'-fluorocytidine-3'-phosphate
  modified_base 17: mod_base = OTHER; note = 2'-O-methylcytidine-3'-phosphate
  modified_base 18: mod_base = OTHER; note = 2'-fluorouridine-3'-phosphate
  modified_base 19: mod_base = OTHER; note = 2'-O-methylguanosine-3'-phosphate
  modified_base 20: mod_base = OTHER; note = 2'-fluorocytidine-3'-phosphate
  modified_base 21: mod_base = OTHER; note = 2'-O-methyladenosine-3'- phosphorothioate
  modified_base 22: mod_base = OTHER; note = 2'-O-methyluridine-3'-phosphorothioate
  modified_base 23: mod_base = OTHER; note = 2'-O-methylguanosine-3'-phosphate
tccatcctgtcacagcctgcatg

SEQ ID NO: 618 - RNA, 23 nt, synthetic construct
  source 1..23: mol_type = other RNA; note = Description of Artificial Sequence: Synthetic oligonucleotide
  modified_base 1: mod_base = OTHER; note = 2'-O-methyluridine-3'-phosphorothioate
  modified_base 2: mod_base = OTHER; note = 2'-fluorocytidine-3'-phosphorothioate
  modified_base 3: mod_base = OTHER; note = 2'-O-methylguanosine-3'-phosphate
  modified_base 4: mod_base = OTHER; note = 2'-fluoroguanosine-3'-phosphate
  modified_base 5: mod_base = OTHER; note = 2'-O-methyluridine-3'-phosphate
  modified_base 6: mod_base = OTHER; note = 2'-fluorouridine-3'-phosphate
  modified_base 7: mod_base = OTHER; note = 2'-O-methylguanosine-3'-phosphate
  modified_base 8: mod_base = OTHER; note = 2'-fluoroguanosine-3'-phosphate
  modified_base 9: mod_base = OTHER; note = 2'-O-methyladenosine-3'-phosphate
  modified_base 10: mod_base = OTHER; note = 2'-fluoroadenosine-3'-phosphate
  modified_base 11: mod_base = OTHER; note = 2'-O-methyluridine-3'-phosphate
  modified_base 12: mod_base = OTHER; note = 2'-O-methyluridine-3'-phosphate
  modified_base 13: mod_base = OTHER; note = 2'-O-methylcytidine-3'-phosphate
  modified_base 14: mod_base = OTHER; note = 2'-fluorouridine-3'-phosphate
  modified_base 15: mod_base = OTHER; note = 2'-O-methyluridine-3'-phosphate
  modified_base 16: mod_base = OTHER; note = 2'-fluorouridine-3'-phosphate
  modified_base 17: mod_base = OTHER; note = 2'-O-methyluridine-3'-phosphate
  modified_base 18: mod_base = OTHER; note = 2'-fluorouridine-3'-phosphate
  modified_base 19: mod_base = OTHER; note = 2'-O-methylguanosine-3'-phosphate
  modified_base 20: mod_base = OTHER; note = 2'-fluoroguanosine-3'-phosphate
  modified_base 21: mod_base = OTHER; note = 2'-O-methyladenosine-3'- phosphorothioate
  modified_base 22: mod_base = OTHER; note = 2'-O-methyladenosine-3'- phosphorothioate
  modified_base 23: mod_base = OTHER; note = 2'-O-methylcytidine-3'-phosphate
tcggttggaattctttttggaac

SEQ ID NO: 619 - RNA, 23 nt, synthetic construct
  source 1..23: mol_type = other RNA; note = Description of Artificial Sequence: Synthetic oligonucleotide
  modified_base 1: mod_base = OTHER; note = 2'-O-methyladenosine-3'- phosphorothioate
  modified_base 2: mod_base = OTHER; note = 2'-fluoroguanosine-3'-phosphorothioate
  modified_base 3: mod_base = OTHER; note = 2'-O-methyladenosine-3'-phosphate
  modified_base 4: mod_base = OTHER; note = 2'-fluorocytidine-3'-phosphate
  modified_base 5: mod_base = OTHER; note = 2'-O-methylcytidine-3'-phosphate
  modified_base 6: mod_base = OTHER; note = 2'-fluorocytidine-3'-phosphate
  modified_base 7: mod_base = OTHER; note = 2'-O-methyluridine-3'-phosphate
  modified_base 8: mod_base = OTHER; note = 2'-fluorocytidine-3'-phosphate
  modified_base 9: mod_base = OTHER; note = 2'-O-methylcytidine-3'-phosphate
  modified_base 10: mod_base = OTHER; note = 2'-fluoroadenosine-3'-phosphate
  modified_base 11: mod_base = OTHER; note = 2'-O-methylcytidine-3'-phosphate
  modified_base 12: mod_base = OTHER; note = 2'-O-methylcytidine-3'-phosphate
  modified_base 13: mod_base = OTHER; note = 2'-O-methyluridine-3'-phosphate
  modified_base 14: mod_base = OTHER; note = 2'-fluorouridine-3'-phosphate
  modified_base 15: mod_base = OTHER; note = 2'-O-methylguanosine-3'-phosphate
  modified_base 16: mod_base = OTHER; note = 2'-fluorouridine-3'-phosphate
  modified_base 17: mod_base = OTHER; note = 2'-O-methylcytidine-3'-phosphate
  modified_base 18: mod_base = OTHER; note = 2'-fluorocytidine-3'-phosphate
  modified_base 19: mod_base = OTHER; note = 2'-O-methyladenosine-3'-phosphate
  modified_base 20: mod_base = OTHER; note = 2'-fluoroguanosine-3'-phosphate
  modified_base 21: mod_base = OTHER; note = 2'-O-methylguanosine-3'- phosphorothioate
  modified_base 22: mod_base = OTHER; note = 2'-O-methyluridine-3'-phosphorothioate
  modified_base 23: mod_base = OTHER; note = 2'-O-methylcytidine-3'-phosphate
agaccctccaccttgtccaggtc

SEQ ID NO: 620 - RNA, 23 nt, synthetic construct
  source 1..23: mol_type = other RNA; note = Description of Artificial Sequence: Synthetic oligonucleotide
  modified_base 1: mod_base = OTHER; note = 2'-O-methyluridine-3'-phosphorothioate
  modified_base 2: mod_base = OTHER; note = 2'-fluorouridine -3'-phosphorothioate
  modified_base 3: mod_base = OTHER; note = 2'-O-methylguanosine-3'-phosphate
  modified_base 4: mod_base = OTHER; note = 2'-fluorouridine-3'-phosphate
  modified_base 5: mod_base = OTHER; note = 2'-O-methylguanosine-3'-phosphate
  modified_base 6: mod_base = OTHER; note = 2'-fluorocytidine-3'-phosphate
  modified_base 7: mod_base = OTHER; note = 2'-O-methyladenosine-3'-phosphate
  modified_base 8: mod_base = OTHER; note = 2'-fluorouridine-3'-phosphate
  modified_base 9: mod_base = OTHER; note = 2'-O-methylguanosine-3'-phosphate
  modified_base 10: mod_base = OTHER; note = 2'-fluorocytidine-3'-phosphate
  modified_base 11: mod_base = OTHER; note = 2'-O-methylcytidine-3'-phosphate
  modified_base 12: mod_base = OTHER; note = 2'-O-methyladenosine-3'-phosphate
  modified_base 13: mod_base = OTHER; note = 2'-O-methyluridine-3'-phosphate
  modified_base 14: mod_base = OTHER; note = 2'-fluoroadenosine-3'-phosphate
  modified_base 15: mod_base = OTHER; note = 2'-O-methyluridine-3'-phosphate
  modified_base 16: mod_base = OTHER; note = 2'-fluoroadenosine-3'-phosphate
  modified_base 17: mod_base = OTHER; note = 2'-O-methyluridine-3'-phosphate
  modified_base 18: mod_base = OTHER; note = 2'-fluoroadenosine-3'-phosphate
  modified_base 19: mod_base = OTHER; note = 2'-O-methylcytidine-3'-phosphate
  modified_base 20: mod_base = OTHER; note = 2'-fluoroguanosine-3'-phosphate
  modified_base 21: mod_base = OTHER; note = 2'-O-methylguanosine-3'- phosphorothioate
  modified_base 22: mod_base = OTHER; note = 2'-O-methyladenosine-3'- phosphorothioate
  modified_base 23: mod_base = OTHER; note = 2'-O-methyladenosine-3'-phosphate
ttgtgcatgccatatatacggaa

SEQ ID NO: 621 - RNA, 23 nt, synthetic construct
  source 1..23: mol_type = other RNA; note = Description of Artificial Sequence: Synthetic oligonucleotide
  modified_base 1: mod_base = OTHER; note = 2'-O-methyluridine-3'-phosphorothioate
  modified_base 2: mod_base = OTHER; note = 2'-fluorocytidine-3'-phosphorothioate
  modified_base 3: mod_base = OTHER; note = 2'-O-methyluridine-3'-phosphate
  modified_base 4: mod_base = OTHER; note = 2'-fluorocytidine-3'-phosphate
  modified_base 5: mod_base = OTHER; note = 2'-O-methyladenosine-3'-phosphate
  modified_base 6: mod_base = OTHER; note = 2'-fluoroadenosine-3'-phosphate
  modified_base 7: mod_base = OTHER; note = 2'-O-methylcytidine-3'-phosphate
  modified_base 8: mod_base = OTHER; note = 2'-fluorouridine-3'-phosphate
  modified_base 9: mod_base = OTHER; note = 2'-O-methyluridine-3'-phosphate
  modified_base 10: mod_base = OTHER; note = 2'-fluoroguanosine-3'-phosphate
  modified_base 11: mod_base = OTHER; note = 2'-O-methyladenosine-3'-phosphate
  modified_base 12: mod_base = OTHER; note = 2'-O-methyladenosine-3'-phosphate
  modified_base 13: mod_base = OTHER; note = 2'-O-methyladenosine-3'-phosphate
  modified_base 14: mod_base = OTHER; note = 2'-fluoroadenosine-3'-phosphate
  modified_base 15: mod_base = OTHER; note = 2'-O-methylguanosine-3'-phosphate
  modified_base 16: mod_base = OTHER; note = 2'-fluoroguanosine-3'-phosphate
  modified_base 17: mod_base = OTHER; note = 2'-O-methylguanosine-3'-phosphate
  modified_base 18: mod_base = OTHER; note = 2'-fluoroadenosine-3'-phosphate
  modified_base 19: mod_base = OTHER; note = 2'-O-methyladenosine-3'-phosphate
  modified_base 20: mod_base = OTHER; note = 2'-fluorocytidine-3'-phosphate
  modified_base 21: mod_base = OTHER; note = 2'-O-methyladenosine-3'- phosphorothioate
  modified_base 22: mod_base = OTHER; note = 2'-O-methylcytidine-3'- phosphorothioate
  modified_base 23: mod_base = OTHER; note = 2'-O-methyluridine-3'-phosphate
tctcaacttgaaaagggaacact

SEQ ID NO: 622 - RNA, 23 nt, synthetic construct
  source 1..23: mol_type = other RNA; note = Description of Artificial Sequence: Synthetic oligonucleotide
  modified_base 1: mod_base = OTHER; note = 2'-O-methyluridine-3'-phosphorothioate
  modified_base 2: mod_base = OTHER; note = 2'-fluoroguanosine-3'-phosphorothioate
  modified_base 3: mod_base = OTHER; note = 2'-O-methyluridine-3'-phosphate
  modified_base 4: mod_base = OTHER; note = 2'-fluoroguanosine-3'-phosphate
  modified_base 5: mod_base = OTHER; note = 2'-O-methylguanosine-3'-phosphate
  modified_base 6: mod_base = OTHER; note = 2'-fluoroguanosine-3'-phosphate
  modified_base 7: mod_base = OTHER; note = 2'-O-methylcytidine-3'-phosphate
  modified_base 8: mod_base = OTHER; note = 2'-fluorouridine-3'-phosphate
  modified_base 9: mod_base = OTHER; note = 2'-O-methylcytidine-3'-phosphate
  modified_base 10: mod_base = OTHER; note = 2'-fluorouridine-3'-phosphate
  modified_base 11: mod_base = OTHER; note = 2'-O-methylcytidine-3'-phosphate
  modified_base 12: mod_base = OTHER; note = 2'-O-methyluridine-3'-phosphate
  modified_base 13: mod_base = OTHER; note = 2'-O-methylcytidine-3'-phosphate
  modified_base 14: mod_base = OTHER; note = 2'-fluorouridine-3'-phosphate
  modified_base 15: mod_base = OTHER; note = 2'-O-methylcytidine-3'-phosphate
  modified_base 16: mod_base = OTHER; note = 2'-fluoroadenosine-3'-phosphate
  modified_base 17: mod_base = OTHER; note = 2'-O-methyluridine-3'-phosphate
  modified_base 18: mod_base = OTHER; note = 2'-fluorocytidine-3'-phosphate
  modified_base 19: mod_base = OTHER; note = 2'-O-methylcytidine-3'-phosphate
  modified_base 20: mod_base = OTHER; note = 2'-fluoroguanosine-3'-phosphate
  modified_base 21: mod_base = OTHER; note = 2'-O-methylcytidine-3'- phosphorothioate
  modified_base 22: mod_base = OTHER; note = 2'-O-methyluridine-3'-phosphorothioate
  modified_base 23: mod_base = OTHER; note = 2'-O-methyluridine-3'-phosphate
tgtgggctctctctcatccgctt

SEQ ID NO: 623 - RNA, 23 nt, synthetic construct
  source 1..23: mol_type = other RNA; note = Description of Artificial Sequence: Synthetic oligonucleotide
  modified_base 1: mod_base = OTHER; note = 2'-O-methyluridine-3'-phosphorothioate
  modified_base 2: mod_base = OTHER; note = 2'-fluorouridine -3'-phosphorothioate
  modified_base 3: mod_base = OTHER; note = 2'-O-methylguanosine-3'-phosphate
  modified_base 4: mod_base = OTHER; note = 2'-fluorocytidine-3'-phosphate
  modified_base 5: mod_base = OTHER; note = 2'-O-methyluridine-3'-phosphate
  modified_base 6: mod_base = OTHER; note = 2'-fluorocytidine-3'-phosphate
  modified_base 7: mod_base = OTHER; note = 2'-O-methyladenosine-3'-phosphate
  modified_base 8: mod_base = OTHER; note = 2'-fluoroadenosine-3'-phosphate
  modified_base 9: mod_base = OTHER; note = 2'-O-methyluridine-3'-phosphate
  modified_base 10: mod_base = OTHER; note = 2'-fluorouridine-3'-phosphate
  modified_base 11: mod_base = OTHER; note = 2'-O-methyluridine-3'-phosphate
  modified_base 12: mod_base = OTHER; note = 2'-O-methyluridine-3'-phosphate
  modified_base 13: mod_base = OTHER; note = 2'-O-methyluridine-3'-phosphate
  modified_base 14: mod_base = OTHER; note = 2'-fluoroguanosine-3'-phosphate
  modified_base 15: mod_base = OTHER; note = 2'-O-methylcytidine-3'-phosphate
  modified_base 16: mod_base = OTHER; note = 2'-fluoroadenosine-3'-phosphate
  modified_base 17: mod_base = OTHER; note = 2'-O-methylguanosine-3'-phosphate
  modified_base 18: mod_base = OTHER; note = 2'-fluoroguanosine-3'-phosphate
  modified_base 19: mod_base = OTHER; note = 2'-O-methyluridine-3'-phosphate
  modified_base 20: mod_base = OTHER; note = 2'-fluorouridine-3'-phosphate
  modified_base 21: mod_base = OTHER; note = 2'-O-methylcytidine-3'- phosphorothioate
  modified_base 22: mod_base = OTHER; note = 2'-O-methyladenosine-3'- phosphorothioate
  modified_base 23: mod_base = OTHER; note = 2'-O-methylguanosine-3'-phosphate
ttgctcaatttttgcaggttcag

SEQ ID NO: 624 - RNA, 23 nt, synthetic construct
  source 1..23: mol_type = other RNA; note = Description of Artificial Sequence: Synthetic oligonucleotide
  modified_base 1: mod_base = OTHER; note = 2'-O-methyluridine-3'-phosphorothioate
  modified_base 2: mod_base = OTHER; note = 2'-fluorocytidine-3'-phosphorothioate
  modified_base 3: mod_base = OTHER; note = 2'-O-methylcytidine-3'-phosphate
  modified_base 4: mod_base = OTHER; note = 2'-fluoroadenosine-3'-phosphate
  modified_base 5: mod_base = OTHER; note = 2'-O-methyladenosine-3'-phosphate
  modified_base 6: mod_base = OTHER; note = 2'-fluorouridine-3'-phosphate
  modified_base 7: mod_base = OTHER; note = 2'-O-methyluridine-3'-phosphate
  modified_base 8: mod_base = OTHER; note = 2'-fluorouridine-3'-phosphate
  modified_base 9: mod_base = OTHER; note = 2'-O-methyluridine-3'-phosphate
  modified_base 10: mod_base = OTHER; note = 2'-fluorouridine-3'-phosphate
  modified_base 11: mod_base = OTHER; note = 2'-O-methylguanosine-3'-phosphate
  modified_base 12: mod_base = OTHER; note = 2'-O-methyluridine-3'-phosphate
  modified_base 13: mod_base = OTHER; note = 2'-O-methyluridine-3'-phosphate
  modified_base 14: mod_base = OTHER; note = 2'-fluorocytidine-3'-phosphate
  modified_base 15: mod_base = OTHER; note = 2'-O-methyluridine-3'-phosphate
  modified_base 16: mod_base = OTHER; note = 2'-fluorocytidine-3'-phosphate
  modified_base 17: mod_base = OTHER; note = 2'-O-methyladenosine-3'-phosphate
  modified_base 18: mod_base = OTHER; note = 2'-fluoroadenosine-3'-phosphate
  modified_base 19: mod_base = OTHER; note = 2'-O-methylcytidine-3'-phosphate
  modified_base 20: mod_base = OTHER; note = 2'-fluorouridine-3'-phosphate
  modified_base 21: mod_base = OTHER; note = 2'-O-methyluridine-3'-phosphorothioate
  modified_base 22: mod_base = OTHER; note = 2'-O-methylguanosine-3'- phosphorothioate
  modified_base 23: mod_base = OTHER; note = 2'-O-methyladenosine-3'-phosphate
tccaatttttgttctcaacttga

SEQ ID NO: 625 - RNA, 23 nt, synthetic construct
  source 1..23: mol_type = other RNA; note = Description of Artificial Sequence: Synthetic oligonucleotide
  modified_base 1: mod_base = OTHER; note = 2'-O-methyluridine-3'-phosphorothioate
  modified_base 2: mod_base = OTHER; note = 2'-fluorocytidine-3'-phosphorothioate
  modified_base 3: mod_base = OTHER; note = 2'-O-methyladenosine-3'-phosphate
  modified_base 4: mod_base = OTHER; note = 2'-fluorouridine-3'-phosphate
  modified_base 5: mod_base = OTHER; note = 2'-O-methyluridine-3'-phosphate
  modified_base 6: mod_base = OTHER; note = 2'-fluoroguanosine-3'-phosphate
  modified_base 7: mod_base = OTHER; note = 2'-O-methylcytidine-3'-phosphate
  modified_base 8: mod_base = OTHER; note = 2'-fluorouridine-3'-phosphate
  modified_base 9: mod_base = OTHER; note = 2'-O-methylcytidine-3'-phosphate
  modified_base 10: mod_base = OTHER; note = 2'-fluoroadenosine-3'-phosphate
  modified_base 11: mod_base = OTHER; note = 2'-O-methyladenosine-3'-phosphate
  modified_base 12: mod_base = OTHER; note = 2'-O-methyluridine-3'-phosphate
  modified_base 13: mod_base = OTHER; note = 2'-O-methyluridine-3'-phosphate
  modified_base 14: mod_base = OTHER; note = 2'-fluorouridine-3'-phosphate
  modified_base 15: mod_base = OTHER; note = 2'-O-methyluridine-3'-phosphate
  modified_base 16: mod_base = OTHER; note = 2'-fluorouridine-3'-phosphate
  modified_base 17: mod_base = OTHER; note = 2'-O-methylguanosine-3'-phosphate
  modified_base 18: mod_base = OTHER; note = 2'-fluorocytidine-3'-phosphate
  modified_base 19: mod_base = OTHER; note = 2'-O-methyladenosine-3'-phosphate
  modified_base 20: mod_base = OTHER; note = 2'-fluoroguanosine-3'-phosphate
  modified_base 21: mod_base = OTHER; note = 2'-O-methylguanosine-3'- phosphorothioate
  modified_base 22: mod_base = OTHER; note = 2'-O-methyluridine-3'-phosphorothioate
  modified_base 23: mod_base = OTHER; note = 2'-O-methyluridine-3'-phosphate
tcattgctcaatttttgcaggtt

SEQ ID NO: 626 - RNA, 23 nt, synthetic construct
  source 1..23: mol_type = other RNA; note = Description of Artificial Sequence: Synthetic oligonucleotide
  modified_base 1: mod_base = OTHER; note = 2'-O-methyladenosine-3'- phosphorothioate
  modified_base 2: mod_base = OTHER; note = 2'-fluoroadenosine-3'-phosphorothioate
  modified_base 3: mod_base = OTHER; note = 2'-O-methylguanosine-3'-phosphate
  modified_base 4: mod_base = OTHER; note = 2'-fluoroadenosine-3'-phosphate
  modified_base 5: mod_base = OTHER; note = 2'-O-methyladenosine-3'-phosphate
  modified_base 6: mod_base = OTHER; note = 2'-fluoroguanosine-3'-phosphate
  modified_base 7: mod_base = OTHER; note = 2'-O-methyluridine-3'-phosphate
  modified_base 8: mod_base = OTHER; note = 2'-fluorouridine-3'-phosphate
  modified_base 9: mod_base = OTHER; note = 2'-O-methylguanosine-3'-phosphate
  modified_base 10: mod_base = OTHER; note = 2'-fluoroguanosine-3'-phosphate
  modified_base 11: mod_base = OTHER; note = 2'-O-methylcytidine-3'-phosphate
  modified_base 12: mod_base = OTHER; note = 2'-O-methylcytidine-3'-phosphate
  modified_base 13: mod_base = OTHER; note = 2'-O-methyladenosine-3'-phosphate
  modified_base 14: mod_base = OTHER; note = 2'-fluoroguanosine-3'-phosphate
  modified_base 15: mod_base = OTHER; note = 2'-O-methylcytidine-3'-phosphate
  modified_base 16: mod_base = OTHER; note = 2'-fluoroadenosine-3'-phosphate
  modified_base 17: mod_base = OTHER; note = 2'-O-methyluridine-3'-phosphate
  modified_base 18: mod_base = OTHER; note = 2'-fluorocytidine-3'-phosphate
  modified_base 19: mod_base = OTHER; note = 2'-O-methylcytidine-3'-phosphate
  modified_base 20: mod_base = OTHER; note = 2'-fluorocytidine-3'-phosphate
  modified_base 21: mod_base = OTHER; note = 2'-O-methylguanosine-3'- phosphorothioate
  modified_base 22: mod_base = OTHER; note = 2'-O-methyladenosine-3'- phosphorothioate
  modified_base 23: mod_base = OTHER; note = 2'-O-methylcytidine-3'-phosphate
aagaagttggccagcatcccgac

SEQ ID NO: 627 - RNA, 23 nt, synthetic construct
  source 1..23: mol_type = other RNA; note = Description of Artificial Sequence: Synthetic oligonucleotide
  modified_base 1: mod_base = OTHER; note = 2'-O-methyluridine-3'-phosphorothioate
  modified_base 2: mod_base = OTHER; note = 2'-fluorouridine -3'-phosphorothioate
  modified_base 3: mod_base = OTHER; note = 2'-O-methylcytidine-3'-phosphate
  modified_base 4: mod_base = OTHER; note = 2'-fluoroadenosine-3'-phosphate
  modified_base 5: mod_base = OTHER; note = 2'-O-methyluridine-3'-phosphate
  modified_base 6: mod_base = OTHER; note = 2'-fluoroguanosine-3'-phosphate
  modified_base 7: mod_base = OTHER; note = 2'-O-methyluridine-3'-phosphate
  modified_base 8: mod_base = OTHER; note = 2'-fluorouridine-3'-phosphate
  modified_base 9: mod_base = OTHER; note = 2'-O-methylcytidine-3'-phosphate
  modified_base 10: mod_base = OTHER; note = 2'-fluorouridine-3'-phosphate
  modified_base 11: mod_base = OTHER; note = 2'-O-methyluridine-3'-phosphate
  modified_base 12: mod_base = OTHER; note = 2'-O-methyladenosine-3'-phosphate
  modified_base 13: mod_base = OTHER; note = 2'-O-methylcytidine-3'-phosphate
  modified_base 14: mod_base = OTHER; note = 2'-fluoroadenosine-3'-phosphate
  modified_base 15: mod_base = OTHER; note = 2'-O-methyluridine-3'-phosphate
  modified_base 16: mod_base = OTHER; note = 2'-fluorouridine-3'-phosphate
  modified_base 17: mod_base = OTHER; note = 2'-O-methylcytidine-3'-phosphate
  modified_base 18: mod_base = OTHER; note = 2'-fluoroadenosine-3'-phosphate
  modified_base 19: mod_base = OTHER; note = 2'-O-methyladenosine-3'-phosphate
  modified_base 20: mod_base = OTHER; note = 2'-fluoroguanosine-3'-phosphate
  modified_base 21: mod_base = OTHER; note = 2'-O-methyladenosine-3'- phosphorothioate
  modified_base 22: mod_base = OTHER; note = 2'-O-methylcytidine-3'- phosphorothioate
  modified_base 23: mod_base = OTHER; note = 2'-O-methyladenosine-3'-phosphate
ttcatgttcttacattcaagaca

SEQ ID NO: 628 - RNA, 23 nt, synthetic construct
  source 1..23: mol_type = other RNA; note = Description of Artificial Sequence: Synthetic oligonucleotide
  modified_base 1: mod_base = OTHER; note = 2'-O-methyladenosine-3'- phosphorothioate
  modified_base 2: mod_base = OTHER; note = 2'-fluoroadenosine-3'-phosphorothioate
  modified_base 3: mod_base = OTHER; note = 2'-O-methyladenosine-3'-phosphate
  modified_base 4: mod_base = OTHER; note = 2'-fluorouridine-3'-phosphate
  modified_base 5: mod_base = OTHER; note = 2'-O-methylcytidine-3'-phosphate
  modified_base 6: mod_base = OTHER; note = 2'-fluoroadenosine-3'-phosphate
  modified_base 7: mod_base = OTHER; note = 2'-O-methylcytidine-3'-phosphate
  modified_base 8: mod_base = OTHER; note = 2'-fluoroadenosine-3'-phosphate
  modified_base 9: mod_base = OTHER; note = 2'-O-methyladenosine-3'-phosphate
  modified_base 10: mod_base = OTHER; note = 2'-fluoroguanosine-3'-phosphate
  modified_base 11: mod_base = OTHER; note = 2'-O-methylcytidine-3'-phosphate
  modified_base 12: mod_base = OTHER; note = 2'-O-methyladenosine-3'-phosphate
  modified_base 13: mod_base = OTHER; note = 2'-O-methyluridine-3'-phosphate
  modified_base 14: mod_base = OTHER; note = 2'-fluorocytidine-3'-phosphate
  modified_base 15: mod_base = OTHER; note = 2'-O-methyluridine-3'-phosphate
  modified_base 16: mod_base = OTHER; note = 2'-fluoroguanosine-3'-phosphate
  modified_base 17: mod_base = OTHER; note = 2'-O-methyluridine-3'-phosphate
  modified_base 18: mod_base = OTHER; note = 2'-fluoroguanosine-3'-phosphate
  modified_base 19: mod_base = OTHER; note = 2'-O-methylguanosine-3'-phosphate
  modified_base 20: mod_base = OTHER; note = 2'-fluoroadenosine-3'-phosphate
  modified_base 21: mod_base = OTHER; note = 2'-O-methyladenosine-3'- phosphorothioate
  modified_base 22: mod_base = OTHER; note = 2'-O-methyladenosine-3'- phosphorothioate
  modified_base 23: mod_base = OTHER; note = 2'-O-methyladenosine-3'-phosphate
aaatcacaagcatctgtggaaaa

SEQ ID NO: 629 - RNA, 23 nt, synthetic construct
  source 1..23: mol_type = other RNA; note = Description of Artificial Sequence: Synthetic oligonucleotide
  modified_base 1: mod_base = OTHER; note = 2'-O-methyluridine-3'-phosphorothioate
  modified_base 2: mod_base = OTHER; note = 2'-fluoroadenosine-3'-phosphorothioate
  modified_base 3: mod_base = OTHER; note = 2'-O-methyluridine-3'-phosphate
  modified_base 4: mod_base = OTHER; note = 2'-fluoroguanosine-3'-phosphate
  modified_base 5: mod_base = OTHER; note = 2'-O-methylguanosine-3'-phosphate
  modified_base 6: mod_base = OTHER; note = 2'-fluoroadenosine-3'-phosphate
  modified_base 7: mod_base = OTHER; note = 2'-O-methylcytidine-3'-phosphate
  modified_base 8: mod_base = OTHER; note = 2'-fluorocytidine-3'-phosphate
  modified_base 9: mod_base = OTHER; note = 2'-O-methyladenosine-3'-phosphate
  modified_base 10: mod_base = OTHER; note = 2'-fluorocytidine-3'-phosphate
  modified_base 11: mod_base = OTHER; note = 2'-O-methylguanosine-3'-phosphate
  modified_base 12: mod_base = OTHER; note = 2'-O-methylcytidine-3'-phosphate
  modified_base 13: mod_base = OTHER; note = 2'-O-methylcytidine-3'-phosphate
  modified_base 14: mod_base = OTHER; note = 2'-fluorocytidine-3'-phosphate
  modified_base 15: mod_base = OTHER; note = 2'-O-methylcytidine-3'-phosphate
  modified_base 16: mod_base = OTHER; note = 2'-fluoroadenosine-3'-phosphate
  modified_base 17: mod_base = OTHER; note = 2'-O-methyluridine-3'-phosphate
  modified_base 18: mod_base = OTHER; note = 2'-fluoroadenosine-3'-phosphate
  modified_base 19: mod_base = OTHER; note = 2'-O-methylguanosine-3'-phosphate
  modified_base 20: mod_base = OTHER; note = 2'-fluorocytidine-3'-phosphate
  modified_base 21: mod_base = OTHER; note = 2'-O-methyluridine-3'-phosphorothioate
  modified_base 22: mod_base = OTHER; note = 2'-O-methylcytidine-3'- phosphorothioate
  modified_base 23: mod_base = OTHER; note = 2'-O-methyladenosine-3'-phosphate
tatggaccacgccccatagctca

SEQ ID NO: 630 - RNA, 23 nt, synthetic construct
  source 1..23: mol_type = other RNA; note = Description of Artificial Sequence: Synthetic oligonucleotide
  modified_base 1: mod_base = OTHER; note = 2'-O-methyluridine-3'-phosphorothioate
  modified_base 2: mod_base = OTHER; note = 2'-fluoroadenosine-3'-phosphorothioate
  modified_base 3: mod_base = OTHER; note = 2'-O-methyladenosine-3'-phosphate
  modified_base 4: mod_base = OTHER; note = 2'-fluoroadenosine-3'-phosphate
  modified_base 5: mod_base = OTHER; note = 2'-O-methylguanosine-3'-phosphate
  modified_base 6: mod_base = OTHER; note = 2'-fluoroadenosine-3'-phosphate
  modified_base 7: mod_base = OTHER; note = 2'-O-methylcytidine-3'-phosphate
  modified_base 8: mod_base = OTHER; note = 2'-fluoroadenosine-3'-phosphate
  modified_base 9: mod_base = OTHER; note = 2'-O-methylguanosine-3'-phosphate
  modified_base 10: mod_base = OTHER; note = 2'-fluorocytidine-3'-phosphate
  modified_base 11: mod_base = OTHER; note = 2'-O-methylcytidine-3'-phosphate
  modified_base 12: mod_base = OTHER; note = 2'-O-methylguanosine-3'-phosphate
  modified_base 13: mod_base = OTHER; note = 2'-O-methyluridine-3'-phosphate
  modified_base 14: mod_base = OTHER; note = 2'-fluorouridine-3'-phosphate
  modified_base 15: mod_base = OTHER; note = 2'-O-methylguanosine-3'-phosphate
  modified_base 16: mod_base = OTHER; note = 2'-fluoroguanosine-3'-phosphate
  modified_base 17: mod_base = OTHER; note = 2'-O-methylguanosine-3'-phosphate
  modified_base 18: mod_base = OTHER; note = 2'-fluoroguanosine-3'-phosphate
  modified_base 19: mod_base = OTHER; note = 2'-O-methyladenosine-3'-phosphate
  modified_base 20: mod_base = OTHER; note = 2'-fluoroguanosine-3'-phosphate
  modified_base 21: mod_base = OTHER; note = 2'-O-methyladenosine-3'- phosphorothioate
  modified_base 22: mod_base = OTHER; note = 2'-O-methylguanosine-3'- phosphorothioate
  modified_base 23: mod_base = OTHER; note = 2'-O-methylguanosine-3'-phosphate
taaagacagccgttggggagagg

SEQ ID NO: 631 - RNA, 19 nt, synthetic construct
  source 1..19: mol_type = other RNA; note = Description of Artificial Sequence: Synthetic oligonucleotide
cgggcagcagggtcagaaa

SEQ ID NO: 632 - RNA, 19 nt, synthetic construct
  source 1..19: mol_type = other RNA; note = Description of Artificial Sequence: Synthetic oligonucleotide
tcagaagtggcccccgtgt

SEQ ID NO: 633 - RNA, 19 nt, synthetic construct
  source 1..19: mol_type = other RNA; note = Description of Artificial Sequence: Synthetic oligonucleotide
cccgtgttgcctaagcaaa

SEQ ID NO: 634 - RNA, 19 nt, synthetic construct
  source 1..19: mol_type = other RNA; note = Description of Artificial Sequence: Synthetic oligonucleotide
tgcacctccggcctgcata

SEQ ID NO: 635 - RNA, 19 nt, synthetic construct
  source 1..19: mol_type = other RNA; note = Description of Artificial Sequence: Synthetic oligonucleotide
tgcatgtccctgtggccta

SEQ ID NO: 636 - RNA, 19 nt, synthetic construct
  source 1..19: mol_type = other RNA; note = Description of Artificial Sequence: Synthetic oligonucleotide
tgtggcctcttgggggtaa

SEQ ID NO: 637 - RNA, 19 nt, synthetic construct
  source 1..19: mol_type = other RNA; note = Description of Artificial Sequence: Synthetic oligonucleotide
ggtcagaaggcctgggtga

SEQ ID NO: 638 - RNA, 19 nt, synthetic construct
  source 1..19: mol_type = other RNA; note = Description of Artificial Sequence: Synthetic oligonucleotide
tgggtggttggcctcagga

SEQ ID NO: 639 - RNA, 19 nt, synthetic construct
  source 1..19: mol_type = other RNA; note = Description of Artificial Sequence: Synthetic oligonucleotide
cctcaggctgtcacacaca

SEQ ID NO: 640 - RNA, 19 nt, synthetic construct
  source 1..19: mol_type = other RNA; note = Description of Artificial Sequence: Synthetic oligonucleotide
cacacacctagggagatga

SEQ ID NO: 641 - RNA, 19 nt, synthetic construct
  source 1..19: mol_type = other RNA; note = Description of Artificial Sequence: Synthetic oligonucleotide
agggagatgctcccgttta

SEQ ID NO: 642 - RNA, 19 nt, synthetic construct
  source 1..19: mol_type = other RNA; note = Description of Artificial Sequence: Synthetic oligonucleotide
ccgtttctgggaaccttga

SEQ ID NO: 643 - RNA, 19 nt, synthetic construct
  source 1..19: mol_type = other RNA; note = Description of Artificial Sequence: Synthetic oligonucleotide
aaccttggccccgactcct

SEQ ID NO: 644 - RNA, 19 nt, synthetic construct
  source 1..19: mol_type = other RNA; note = Description of Artificial Sequence: Synthetic oligonucleotide
cgactcctgcaaacttcga

SEQ ID NO: 645 - RNA, 19 nt, synthetic construct
  source 1..19: mol_type = other RNA; note = Description of Artificial Sequence: Synthetic oligonucleotide
aacttcggtaaatgtgtaa

SEQ ID NO: 646 - RNA, 19 nt, synthetic construct
  source 1..19: mol_type = other RNA; note = Description of Artificial Sequence: Synthetic oligonucleotide
tgtgtaactcgaccctgca

SEQ ID NO: 647 - RNA, 19 nt, synthetic construct
  source 1..19: mol_type = other RNA; note = Description of Artificial Sequence: Synthetic oligonucleotide
accctgcaccggctcacta

SEQ ID NO: 648 - RNA, 19 nt, synthetic construct
  source 1..19: mol_type = other RNA; note = Description of Artificial Sequence: Synthetic oligonucleotide
gctcactctgttcagcagt

SEQ ID NO: 649 - RNA, 19 nt, synthetic construct
  source 1..19: mol_type = other RNA; note = Description of Artificial Sequence: Synthetic oligonucleotide
ttcagcagtgaaactctga

SEQ ID NO: 650 - RNA, 19 nt, synthetic construct
  source 1..19: mol_type = other RNA; note = Description of Artificial Sequence: Synthetic oligonucleotide
aaactctgcatcgatcact

SEQ ID NO: 651 - RNA, 19 nt, synthetic construct
  source 1..19: mol_type = other RNA; note = Description of Artificial Sequence: Synthetic oligonucleotide
cgatcactaagacttccta

SEQ ID NO: 652 - RNA, 19 nt, synthetic construct
  source 1..19: mol_type = other RNA; note = Description of Artificial Sequence: Synthetic oligonucleotide
gaggtcccagcgtgagtgt

SEQ ID NO: 653 - RNA, 19 nt, synthetic construct
  source 1..19: mol_type = other RNA; note = Description of Artificial Sequence: Synthetic oligonucleotide
ttctggcatctgtccttct

SEQ ID NO: 654 - RNA, 19 nt, synthetic construct
  source 1..19: mol_type = other RNA; note = Description of Artificial Sequence: Synthetic oligonucleotide
ccttctggccagcctgtga

SEQ ID NO: 655 - RNA, 19 nt, synthetic construct
  source 1..19: mol_type = other RNA; note = Description of Artificial Sequence: Synthetic oligonucleotide
agcctgtggtctggccaaa

SEQ ID NO: 656 - RNA, 19 nt, synthetic construct
  source 1..19: mol_type = other RNA; note = Description of Artificial Sequence: Synthetic oligonucleotide
ggccaagtgatgtaaccct

SEQ ID NO: 657 - RNA, 19 nt, synthetic construct
  source 1..19: mol_type = other RNA; note = Description of Artificial Sequence: Synthetic oligonucleotide
tgtaaccctcctctccaga

SEQ ID NO: 658 - RNA, 19 nt, synthetic construct
  source 1..19: mol_type = other RNA; note = Description of Artificial Sequence: Synthetic oligonucleotide
tctccagcctgtgcacaga

SEQ ID NO: 659 - RNA, 19 nt, synthetic construct
  source 1..19: mol_type = other RNA; note = Description of Artificial Sequence: Synthetic oligonucleotide
tgcacaggcagcctgggaa

SEQ ID NO: 660 - RNA, 19 nt, synthetic construct
  source 1..19: mol_type = other RNA; note = Description of Artificial Sequence: Synthetic oligonucleotide
cctgggaacagctccatca

SEQ ID NO: 661 - RNA, 19 nt, synthetic construct
  source 1..19: mol_type = other RNA; note = Description of Artificial Sequence: Synthetic oligonucleotide
tccatccccacccctcaga

SEQ ID NO: 662 - RNA, 19 nt, synthetic construct
  source 1..19: mol_type = other RNA; note = Description of Artificial Sequence: Synthetic oligonucleotide
ccctcagctataaatagga

SEQ ID NO: 663 - RNA, 19 nt, synthetic construct
  source 1..19: mol_type = other RNA; note = Description of Artificial Sequence: Synthetic oligonucleotide
taaatagggcatcgtgaca

SEQ ID NO: 664 - RNA, 19 nt, synthetic construct
  source 1..19: mol_type = other RNA; note = Description of Artificial Sequence: Synthetic oligonucleotide
atcgtgacccggccgggga

SEQ ID NO: 665 - RNA, 19 nt, synthetic construct
  source 1..19: mol_type = other RNA; note = Description of Artificial Sequence: Synthetic oligonucleotide
ccgggggaagaagctgcca

SEQ ID NO: 666 - RNA, 19 nt, synthetic construct
  source 1..19: mol_type = other RNA; note = Description of Artificial Sequence: Synthetic oligonucleotide
agctgccgttgttctgggt

SEQ ID NO: 667 - RNA, 19 nt, synthetic construct
  source 1..19: mol_type = other RNA; note = Description of Artificial Sequence: Synthetic oligonucleotide
ttctgggtactacagcaga

SEQ ID NO: 668 - RNA, 19 nt, synthetic construct
  source 1..19: mol_type = other RNA; note = Description of Artificial Sequence: Synthetic oligonucleotide
tacagcagaagggtatgca

SEQ ID NO: 669 - RNA, 19 nt, synthetic construct
  source 1..19: mol_type = other RNA; note = Description of Artificial Sequence: Synthetic oligonucleotide
tatgcggaagcgagcacca

SEQ ID NO: 670 - RNA, 19 nt, synthetic construct
  source 1..19: mol_type = other RNA; note = Description of Artificial Sequence: Synthetic oligonucleotide
cgagcaccccagtctgaga

SEQ ID NO: 671 - RNA, 19 nt, synthetic construct
  source 1..19: mol_type = other RNA; note = Description of Artificial Sequence: Synthetic oligonucleotide
ctcctgccggtgtgagcct

SEQ ID NO: 672 - RNA, 19 nt, synthetic construct
  source 1..19: mol_type = other RNA; note = Description of Artificial Sequence: Synthetic oligonucleotide
tgtgagcctgagggccaca

SEQ ID NO: 673 - RNA, 19 nt, synthetic construct
  source 1..19: mol_type = other RNA; note = Description of Artificial Sequence: Synthetic oligonucleotide
gggccaccatcctctgcct

SEQ ID NO: 674 - RNA, 19 nt, synthetic construct
  source 1..19: mol_type = other RNA; note = Description of Artificial Sequence: Synthetic oligonucleotide
ctgcctcctggcctgggct

SEQ ID NO: 675 - RNA, 19 nt, synthetic construct
  source 1..19: mol_type = other RNA; note = Description of Artificial Sequence: Synthetic oligonucleotide
cctggctgcaggtgaccga

SEQ ID NO: 676 - RNA, 19 nt, synthetic construct
  source 1..19: mol_type = other RNA; note = Description of Artificial Sequence: Synthetic oligonucleotide
tgaccgggtgtacatacaa

SEQ ID NO: 677 - RNA, 19 nt, synthetic construct
  source 1..19: mol_type = other RNA; note = Description of Artificial Sequence: Synthetic oligonucleotide
tacatacaccccttccaca

SEQ ID NO: 678 - RNA, 19 nt, synthetic construct
  source 1..19: mol_type = other RNA; note = Description of Artificial Sequence: Synthetic oligonucleotide
ttccacctcgtcatccaca

SEQ ID NO: 679 - RNA, 19 nt, synthetic construct
  source 1..19: mol_type = other RNA; note = Description of Artificial Sequence: Synthetic oligonucleotide
tcatccacaatgagagtaa

SEQ ID NO: 680 - RNA, 19 nt, synthetic construct
  source 1..19: mol_type = other RNA; note = Description of Artificial Sequence: Synthetic oligonucleotide
aaaggccaatgccgggaaa

SEQ ID NO: 681 - RNA, 19 nt, synthetic construct
  source 1..19: mol_type = other RNA; note = Description of Artificial Sequence: Synthetic oligonucleotide
ccgggaagcccaaagacca

SEQ ID NO: 682 - RNA, 19 nt, synthetic construct
  source 1..19: mol_type = other RNA; note = Description of Artificial Sequence: Synthetic oligonucleotide
aaagaccccaccttcataa

SEQ ID NO: 683 - RNA, 19 nt, synthetic construct
  source 1..19: mol_type = other RNA; note = Description of Artificial Sequence: Synthetic oligonucleotide
ccttcatacctgctccaat

SEQ ID NO: 684 - RNA, 19 nt, synthetic construct
  source 1..19: mol_type = other RNA; note = Description of Artificial Sequence: Synthetic oligonucleotide
ctccaattcaggccaagaa

SEQ ID NO: 685 - RNA, 19 nt, synthetic construct
  source 1..19: mol_type = other RNA; note = Description of Artificial Sequence: Synthetic oligonucleotide
aggccaagacatcccctgt

SEQ ID NO: 686 - RNA, 19 nt, synthetic construct
  source 1..19: mol_type = other RNA; note = Description of Artificial Sequence: Synthetic oligonucleotide
tcccctgtggatgaaaaga

SEQ ID NO: 687 - RNA, 19 nt, synthetic construct
  source 1..19: mol_type = other RNA; note = Description of Artificial Sequence: Synthetic oligonucleotide
aaaaggccctacaggacca

SEQ ID NO: 688 - RNA, 19 nt, synthetic construct
  source 1..19: mol_type = other RNA; note = Description of Artificial Sequence: Synthetic oligonucleotide
tacaggaccagctggtgct

SEQ ID NO: 689 - RNA, 19 nt, synthetic construct
  source 1..19: mol_type = other RNA; note = Description of Artificial Sequence: Synthetic oligonucleotide
ttgacaccgaagacaagtt

SEQ ID NO: 690 - RNA, 19 nt, synthetic construct
  source 1..19: mol_type = other RNA; note = Description of Artificial Sequence: Synthetic oligonucleotide
acaagttgagggccgcaat

SEQ ID NO: 691 - RNA, 19 nt, synthetic construct
  source 1..19: mol_type = other RNA; note = Description of Artificial Sequence: Synthetic oligonucleotide
gccgcaatggtcgggatga

SEQ ID NO: 692 - RNA, 19 nt, synthetic construct
  source 1..19: mol_type = other RNA; note = Description of Artificial Sequence: Synthetic oligonucleotide
cgggatgctggccaactta

SEQ ID NO: 693 - RNA, 19 nt, synthetic construct
  source 1..19: mol_type = other RNA; note = Description of Artificial Sequence: Synthetic oligonucleotide
caacttcttgggcttccgt

SEQ ID NO: 694 - RNA, 19 nt, synthetic construct
  source 1..19: mol_type = other RNA; note = Description of Artificial Sequence: Synthetic oligonucleotide
ggcttccgtatatatggca

SEQ ID NO: 695 - RNA, 19 nt, synthetic construct
  source 1..19: mol_type = other RNA; note = Description of Artificial Sequence: Synthetic oligonucleotide
tatggcatgcacagtgaga

SEQ ID NO: 696 - RNA, 19 nt, synthetic construct
  source 1..19: mol_type = other RNA; note = Description of Artificial Sequence: Synthetic oligonucleotide
acagtgagctatggggcgt

SEQ ID NO: 697 - RNA, 19 nt, synthetic construct
  source 1..19: mol_type = other RNA; note = Description of Artificial Sequence: Synthetic oligonucleotide
cgtcctctccccaacggct

SEQ ID NO: 698 - RNA, 19 nt, synthetic construct
  source 1..19: mol_type = other RNA; note = Description of Artificial Sequence: Synthetic oligonucleotide
tttggcaccctggcctcta

SEQ ID NO: 699 - RNA, 19 nt, synthetic construct
  source 1..19: mol_type = other RNA; note = Description of Artificial Sequence: Synthetic oligonucleotide
ctggcctctctctatctga

SEQ ID NO: 700 - RNA, 19 nt, synthetic construct
  source 1..19: mol_type = other RNA; note = Description of Artificial Sequence: Synthetic oligonucleotide
tatctgggagccttggaca

SEQ ID NO: 701 - RNA, 19 nt, synthetic construct
  source 1..19: mol_type = other RNA; note = Description of Artificial Sequence: Synthetic oligonucleotide
ttggaccacacagctgaca

SEQ ID NO: 702 - RNA, 19 nt, synthetic construct
  source 1..19: mol_type = other RNA; note = Description of Artificial Sequence: Synthetic oligonucleotide
acagctgacaggctacaga

SEQ ID NO: 703 - RNA, 19 nt, synthetic construct
  source 1..19: mol_type = other RNA; note = Description of Artificial Sequence: Synthetic oligonucleotide
tacaggcaatcctgggtgt

SEQ ID NO: 704 - RNA, 19 nt, synthetic construct
  source 1..19: mol_type = other RNA; note = Description of Artificial Sequence: Synthetic oligonucleotide
tcctgggtgttccttggaa

SEQ ID NO: 705 - RNA, 19 nt, synthetic construct
  source 1..19: mol_type = other RNA; note = Description of Artificial Sequence: Synthetic oligonucleotide
ttggaaggacaagaactga

SEQ ID NO: 706 - RNA, 19 nt, synthetic construct
  source 1..19: mol_type = other RNA; note = Description of Artificial Sequence: Synthetic oligonucleotide
agaactgcacctcccggct

SEQ ID NO: 707 - RNA, 19 nt, synthetic construct
  source 1..19: mol_type = other RNA; note = Description of Artificial Sequence: Synthetic oligonucleotide
tgcgcacaaggtcctgtct

SEQ ID NO: 708 - RNA, 19 nt, synthetic construct
  source 1..19: mol_type = other RNA; note = Description of Artificial Sequence: Synthetic oligonucleotide
ctgcaggctgtacagggca

SEQ ID NO: 709 - RNA, 19 nt, synthetic construct
  source 1..19: mol_type = other RNA; note = Description of Artificial Sequence: Synthetic oligonucleotide
tacagggcctgctagtgga

SEQ ID NO: 710 - RNA, 19 nt, synthetic construct
  source 1..19: mol_type = other RNA; note = Description of Artificial Sequence: Synthetic oligonucleotide
tagtggcccagggcaggga

SEQ ID NO: 711 - RNA, 19 nt, synthetic construct
  source 1..19: mol_type = other RNA; note = Description of Artificial Sequence: Synthetic oligonucleotide
agggcagggctgatagcca

SEQ ID NO: 712 - RNA, 19 nt, synthetic construct
  source 1..19: mol_type = other RNA; note = Description of Artificial Sequence: Synthetic oligonucleotide
tagccaggcccagctgcta

SEQ ID NO: 713 - RNA, 19 nt, synthetic construct
  source 1..19: mol_type = other RNA; note = Description of Artificial Sequence: Synthetic oligonucleotide
agctgctgctgtccacggt

SEQ ID NO: 714 - RNA, 19 nt, synthetic construct
  source 1..19: mol_type = other RNA; note = Description of Artificial Sequence: Synthetic oligonucleotide
tgggcgtgttcacagccca

SEQ ID NO: 715 - RNA, 19 nt, synthetic construct
  source 1..19: mol_type = other RNA; note = Description of Artificial Sequence: Synthetic oligonucleotide
cacagccccaggcctgcaa

SEQ ID NO: 716 - RNA, 19 nt, synthetic construct
  source 1..19: mol_type = other RNA; note = Description of Artificial Sequence: Synthetic oligonucleotide
ctgcacctgaagcagccgt

SEQ ID NO: 717 - RNA, 19 nt, synthetic construct
  source 1..19: mol_type = other RNA; note = Description of Artificial Sequence: Synthetic oligonucleotide
agcagccgtttgtgcagga

SEQ ID NO: 718 - RNA, 19 nt, synthetic construct
  source 1..19: mol_type = other RNA; note = Description of Artificial Sequence: Synthetic oligonucleotide
tgcagggcctggctctcta

SEQ ID NO: 719 - RNA, 19 nt, synthetic construct
  source 1..19: mol_type = other RNA; note = Description of Artificial Sequence: Synthetic oligonucleotide
tggctctctatacccctgt

SEQ ID NO: 720 - RNA, 19 nt, synthetic construct
  source 1..19: mol_type = other RNA; note = Description of Artificial Sequence: Synthetic oligonucleotide
acccctgtggtcctcccaa

SEQ ID NO: 721 - RNA, 19 nt, synthetic construct
  source 1..19: mol_type = other RNA; note = Description of Artificial Sequence: Synthetic oligonucleotide
ctggacttcacagaactga

SEQ ID NO: 722 - RNA, 19 nt, synthetic construct
  source 1..19: mol_type = other RNA; note = Description of Artificial Sequence: Synthetic oligonucleotide
agaactggatgttgctgct

SEQ ID NO: 723 - RNA, 19 nt, synthetic construct
  source 1..19: mol_type = other RNA; note = Description of Artificial Sequence: Synthetic oligonucleotide
ttgctgctgagaagattga

SEQ ID NO: 724 - RNA, 19 nt, synthetic construct
  source 1..19: mol_type = other RNA; note = Description of Artificial Sequence: Synthetic oligonucleotide
agaagattgacaggttcat

SEQ ID NO: 725 - RNA, 19 nt, synthetic construct
  source 1..19: mol_type = other RNA; note = Description of Artificial Sequence: Synthetic oligonucleotide
aggttcatgcaggctgtga

SEQ ID NO: 726 - RNA, 19 nt, synthetic construct
  source 1..19: mol_type = other RNA; note = Description of Artificial Sequence: Synthetic oligonucleotide
gctgtgacaggatggaaga

SEQ ID NO: 727 - RNA, 19 nt, synthetic construct
  source 1..19: mol_type = other RNA; note = Description of Artificial Sequence: Synthetic oligonucleotide
tggaagactggctgctcca

SEQ ID NO: 728 - RNA, 19 nt, synthetic construct
  source 1..19: mol_type = other RNA; note = Description of Artificial Sequence: Synthetic oligonucleotide
atgggagccagtgtggaca

SEQ ID NO: 729 - RNA, 19 nt, synthetic construct
  source 1..19: mol_type = other RNA; note = Description of Artificial Sequence: Synthetic oligonucleotide
tgtggacagcaccctggct

SEQ ID NO: 730 - RNA, 19 nt, synthetic construct
  source 1..19: mol_type = other RNA; note = Description of Artificial Sequence: Synthetic oligonucleotide
cctggctttcaacacctaa

SEQ ID NO: 731 - RNA, 19 nt, synthetic construct
  source 1..19: mol_type = other RNA; note = Description of Artificial Sequence: Synthetic oligonucleotide
caacacctacgtccactta

SEQ ID NO: 732 - RNA, 19 nt, synthetic construct
  source 1..19: mol_type = other RNA; note = Description of Artificial Sequence: Synthetic oligonucleotide
cacttccaagggaagatga

SEQ ID NO: 733 - RNA, 19 nt, synthetic construct
  source 1..19: mol_type = other RNA; note = Description of Artificial Sequence: Synthetic oligonucleotide
gggaagatgaagggcttct

SEQ ID NO: 734 - RNA, 19 nt, synthetic construct
  source 1..19: mol_type = other RNA; note = Description of Artificial Sequence: Synthetic oligonucleotide
gcttctccctgctggccga

SEQ ID NO: 735 - RNA, 19 nt, synthetic construct
  source 1..19: mol_type = other RNA; note = Description of Artificial Sequence: Synthetic oligonucleotide
ccaggagttctgggtggaa

SEQ ID NO: 736 - RNA, 19 nt, synthetic construct
  source 1..19: mol_type = other RNA; note = Description of Artificial Sequence: Synthetic oligonucleotide
tgggtggacaacagcacct

SEQ ID NO: 737 - RNA, 19 nt, synthetic construct
  source 1..19: mol_type = other RNA; note = Description of Artificial Sequence: Synthetic oligonucleotide
acagcacctcagtgtctgt

SEQ ID NO: 738 - RNA, 19 nt, synthetic construct
  source 1..19: mol_type = other RNA; note = Description of Artificial Sequence: Synthetic oligonucleotide
tgtctgttcccatgctcta

SEQ ID NO: 739 - RNA, 19 nt, synthetic construct
  source 1..19: mol_type = other RNA; note = Description of Artificial Sequence: Synthetic oligonucleotide
catgctctctggcatggga

SEQ ID NO: 740 - RNA, 19 nt, synthetic construct
  source 1..19: mol_type = other RNA; note = Description of Artificial Sequence: Synthetic oligonucleotide
atgggcaccttccagcact

SEQ ID NO: 741 - RNA, 19 nt, synthetic construct
  source 1..19: mol_type = other RNA; note = Description of Artificial Sequence: Synthetic oligonucleotide
ttccagcactggagtgaca

SEQ ID NO: 742 - RNA, 19 nt, synthetic construct
  source 1..19: mol_type = other RNA; note = Description of Artificial Sequence: Synthetic oligonucleotide
aggacaacttctcggtgaa

SEQ ID NO: 743 - RNA, 19 nt, synthetic construct
  source 1..19: mol_type = other RNA; note = Description of Artificial Sequence: Synthetic oligonucleotide
tcggtgactcaagtgccct

SEQ ID NO: 744 - RNA, 19 nt, synthetic construct
  source 1..19: mol_type = other RNA; note = Description of Artificial Sequence: Synthetic oligonucleotide
tgcccttcactgagagcga

SEQ ID NO: 745 - RNA, 19 nt, synthetic construct
  source 1..19: mol_type = other RNA; note = Description of Artificial Sequence: Synthetic oligonucleotide
tgagagcgcctgcctgcta

SEQ ID NO: 746 - RNA, 19 nt, synthetic construct
  source 1..19: mol_type = other RNA; note = Description of Artificial Sequence: Synthetic oligonucleotide
cctgctgctgatccagcct

SEQ ID NO: 747 - RNA, 19 nt, synthetic construct
  source 1..19: mol_type = other RNA; note = Description of Artificial Sequence: Synthetic oligonucleotide
atccagcctcactatgcct

SEQ ID NO: 748 - RNA, 19 nt, synthetic construct
  source 1..19: mol_type = other RNA; note = Description of Artificial Sequence: Synthetic oligonucleotide
tatgcctctgacctggaca

SEQ ID NO: 749 - RNA, 19 nt, synthetic construct
  source 1..19: mol_type = other RNA; note = Description of Artificial Sequence: Synthetic oligonucleotide
acctggacaaggtggagga

SEQ ID NO: 750 - RNA, 19 nt, synthetic construct
  source 1..19: mol_type = other RNA; note = Description of Artificial Sequence: Synthetic oligonucleotide
tggagggtctcactttcca

SEQ ID NO: 751 - RNA, 19 nt, synthetic construct
  source 1..19: mol_type = other RNA; note = Description of Artificial Sequence: Synthetic oligonucleotide
cactttccagcaaaactca

SEQ ID NO: 752 - RNA, 19 nt, synthetic construct
  source 1..19: mol_type = other RNA; note = Description of Artificial Sequence: Synthetic oligonucleotide
aaaactccctcaactggat

SEQ ID NO: 753 - RNA, 19 nt, synthetic construct
  source 1..19: mol_type = other RNA; note = Description of Artificial Sequence: Synthetic oligonucleotide
aactggatgaagaaactat

SEQ ID NO: 754 - RNA, 19 nt, synthetic construct
  source 1..19: mol_type = other RNA; note = Description of Artificial Sequence: Synthetic oligonucleotide
aaactatctccccggacca

SEQ ID NO: 755 - RNA, 19 nt, synthetic construct
  source 1..19: mol_type = other RNA; note = Description of Artificial Sequence: Synthetic oligonucleotide
ccggaccatccacctgaca

SEQ ID NO: 756 - RNA, 19 nt, synthetic construct
  source 1..19: mol_type = other RNA; note = Description of Artificial Sequence: Synthetic oligonucleotide
tgccccaactggtgctgca

SEQ ID NO: 757 - RNA, 19 nt, synthetic construct
  source 1..19: mol_type = other RNA; note = Description of Artificial Sequence: Synthetic oligonucleotide
tgctgcaaggatcttatga

SEQ ID NO: 758 - RNA, 19 nt, synthetic construct
  source 1..19: mol_type = other RNA; note = Description of Artificial Sequence: Synthetic oligonucleotide
tcttatgacctgcaggaca

SEQ ID NO: 759 - RNA, 19 nt, synthetic construct
  source 1..19: mol_type = other RNA; note = Description of Artificial Sequence: Synthetic oligonucleotide
tgcaggacctgctcgccca

SEQ ID NO: 760 - RNA, 19 nt, synthetic construct
  source 1..19: mol_type = other RNA; note = Description of Artificial Sequence: Synthetic oligonucleotide
tcgcccaggctgagctgca

SEQ ID NO: 761 - RNA, 19 nt, synthetic construct
  source 1..19: mol_type = other RNA; note = Description of Artificial Sequence: Synthetic oligonucleotide
tgagctgcccgccattcta

SEQ ID NO: 762 - RNA, 19 nt, synthetic construct
  source 1..19: mol_type = other RNA; note = Description of Artificial Sequence: Synthetic oligonucleotide
tgcaaaaattgagcaatga

SEQ ID NO: 763 - RNA, 19 nt, synthetic construct
  source 1..19: mol_type = other RNA; note = Description of Artificial Sequence: Synthetic oligonucleotide
agcaatgaccgcatcagga

SEQ ID NO: 764 - RNA, 19 nt, synthetic construct
  source 1..19: mol_type = other RNA; note = Description of Artificial Sequence: Synthetic oligonucleotide
catcagggtgggggaggta

SEQ ID NO: 765 - RNA, 19 nt, synthetic construct
  source 1..19: mol_type = other RNA; note = Description of Artificial Sequence: Synthetic oligonucleotide
ggggaggtgctgaacagca

SEQ ID NO: 766 - RNA, 19 nt, synthetic construct
  source 1..19: mol_type = other RNA; note = Description of Artificial Sequence: Synthetic oligonucleotide
aacagcattttttttgaga

SEQ ID NO: 767 - RNA, 19 nt, synthetic construct
  source 1..19: mol_type = other RNA; note = Description of Artificial Sequence: Synthetic oligonucleotide
tttttgagcttgaagcgga

SEQ ID NO: 768 - RNA, 19 nt, synthetic construct
  source 1..19: mol_type = other RNA; note = Description of Artificial Sequence: Synthetic oligonucleotide
agagtctacccaacagctt

SEQ ID NO: 769 - RNA, 19 nt, synthetic construct
  source 1..19: mol_type = other RNA; note = Description of Artificial Sequence: Synthetic oligonucleotide
caacagcttaacaagccta

SEQ ID NO: 770 - RNA, 19 nt, synthetic construct
  source 1..19: mol_type = other RNA; note = Description of Artificial Sequence: Synthetic oligonucleotide
caagcctgaggtcttggaa

SEQ ID NO: 771 - RNA, 19 nt, synthetic construct
  source 1..19: mol_type = other RNA; note = Description of Artificial Sequence: Synthetic oligonucleotide
cttggaggtgaccctgaaa

SEQ ID NO: 772 - RNA, 19 nt, synthetic construct
  source 1..19: mol_type = other RNA; note = Description of Artificial Sequence: Synthetic oligonucleotide
accctgaaccgcccattca

SEQ ID NO: 773 - RNA, 19 nt, synthetic construct
  source 1..19: mol_type = other RNA; note = Description of Artificial Sequence: Synthetic oligonucleotide
gcccattcctgtttgctgt

SEQ ID NO: 774 - RNA, 19 nt, synthetic construct
  source 1..19: mol_type = other RNA; note = Description of Artificial Sequence: Synthetic oligonucleotide
cacttcctgggccgcgtga

SEQ ID NO: 775 - RNA, 19 nt, synthetic construct
  source 1..19: mol_type = other RNA; note = Description of Artificial Sequence: Synthetic oligonucleotide
cgcgtggccaacccgctga

SEQ ID NO: 776 - RNA, 19 nt, synthetic construct
  source 1..19: mol_type = other RNA; note = Description of Artificial Sequence: Synthetic oligonucleotide
acccgctgagcacagcata

SEQ ID NO: 777 - RNA, 19 nt, synthetic construct
  source 1..19: mol_type = other RNA; note = Description of Artificial Sequence: Synthetic oligonucleotide
acagcatgaggccagggca

SEQ ID NO: 778 - RNA, 19 nt, synthetic construct
  source 1..19: mol_type = other RNA; note = Description of Artificial Sequence: Synthetic oligonucleotide
cagggccccagaacacagt

SEQ ID NO: 779 - RNA, 19 nt, synthetic construct
  source 1..19: mol_type = other RNA; note = Description of Artificial Sequence: Synthetic oligonucleotide
tctgcccctggcctttgaa

SEQ ID NO: 780 - RNA, 19 nt, synthetic construct
  source 1..19: mol_type = other RNA; note = Description of Artificial Sequence: Synthetic oligonucleotide
tttgaggcaaaggccagca

SEQ ID NO: 781 - RNA, 19 nt, synthetic construct
  source 1..19: mol_type = other RNA; note = Description of Artificial Sequence: Synthetic oligonucleotide
aggccagcagcagataaca

SEQ ID NO: 782 - RNA, 19 nt, synthetic construct
  source 1..19: mol_type = other RNA; note = Description of Artificial Sequence: Synthetic oligonucleotide
agataacaaccccggacaa

SEQ ID NO: 783 - RNA, 19 nt, synthetic construct
  source 1..19: mol_type = other RNA; note = Description of Artificial Sequence: Synthetic oligonucleotide
ccggacaaatcagcgatgt

SEQ ID NO: 784 - RNA, 19 nt, synthetic construct
  source 1..19: mol_type = other RNA; note = Description of Artificial Sequence: Synthetic oligonucleotide
agcgatgtgtcacccccaa

SEQ ID NO: 785 - RNA, 19 nt, synthetic construct
  source 1..19: mol_type = other RNA; note = Description of Artificial Sequence: Synthetic oligonucleotide
ttctaatgagtcgacttta

SEQ ID NO: 786 - RNA, 19 nt, synthetic construct
  source 1..19: mol_type = other RNA; note = Description of Artificial Sequence: Synthetic oligonucleotide
gtttctccttggtctaagt

SEQ ID NO: 787 - RNA, 19 nt, synthetic construct
  source 1..19: mol_type = other RNA; note = Description of Artificial Sequence: Synthetic oligonucleotide
agcctgcagcggcacaaat

SEQ ID NO: 788 - RNA, 19 nt, synthetic construct
  source 1..19: mol_type = other RNA; note = Description of Artificial Sequence: Synthetic oligonucleotide
cacaaatgcacctcccagt

SEQ ID NO: 789 - RNA, 19 nt, synthetic construct
  source 1..19: mol_type = other RNA; note = Description of Artificial Sequence: Synthetic oligonucleotide
acctcccagtttgctgggt

SEQ ID NO: 790 - RNA, 19 nt, synthetic construct
  source 1..19: mol_type = other RNA; note = Description of Artificial Sequence: Synthetic oligonucleotide
tgctgggtttattttagaa

SEQ ID NO: 791 - RNA, 19 nt, synthetic construct
  source 1..19: mol_type = other RNA; note = Description of Artificial Sequence: Synthetic oligonucleotide
caagaaccagtgtttagca

SEQ ID NO: 792 - RNA, 19 nt, synthetic construct
  source 1..19: mol_type = other RNA; note = Description of Artificial Sequence: Synthetic oligonucleotide
agtgttcccttttcaagtt

SEQ ID NO: 793 - RNA, 19 nt, synthetic construct
  source 1..19: mol_type = other RNA; note = Description of Artificial Sequence: Synthetic oligonucleotide
ttcaagttgagaacaaaaa

SEQ ID NO: 794 - RNA, 19 nt, synthetic construct
  source 1..19: mol_type = other RNA; note = Description of Artificial Sequence: Synthetic oligonucleotide
caaaaattgggttttaaaa

SEQ ID NO: 795 - RNA, 19 nt, synthetic construct
  source 1..19: mol_type = other RNA; note = Description of Artificial Sequence: Synthetic oligonucleotide
aaagtatacatttttgcat

SEQ ID NO: 796 - RNA, 19 nt, synthetic construct
  source 1..19: mol_type = other RNA; note = Description of Artificial Sequence: Synthetic oligonucleotide
tttagtgtcttgaatgtaa

SEQ ID NO: 797 - RNA, 19 nt, synthetic construct
  source 1..19: mol_type = other RNA; note = Description of Artificial Sequence: Synthetic oligonucleotide
gaatgtaagaacatgacct

SEQ ID NO: 798 - RNA, 19 nt, synthetic construct
  source 1..19: mol_type = other RNA; note = Description of Artificial Sequence: Synthetic oligonucleotide
tgtagtgtctgtaatacct

SEQ ID NO: 799 - RNA, 19 nt, synthetic construct
  source 1..19: mol_type = other RNA; note = Description of Artificial Sequence: Synthetic oligonucleotide
tgtaataccttagtttttt

SEQ ID NO: 800 - RNA, 19 nt, synthetic construct
  source 1..19: mol_type = other RNA; note = Description of Artificial Sequence: Synthetic oligonucleotide
ttttttccacagatgctta

SEQ ID NO: 801 - RNA, 19 nt, synthetic construct
  source 1..19: mol_type = other RNA; note = Description of Artificial Sequence: Synthetic oligonucleotide
tttttgaacaatacgtgaa

SEQ ID NO: 802 - RNA, 19 nt, synthetic construct
  source 1..19: mol_type = other RNA; note = Description of Artificial Sequence: Synthetic oligonucleotide
accatagctggttatttct

SEQ ID NO: 803 - RNA, 19 nt, synthetic construct
  source 1..19: mol_type = other RNA; note = Description of Artificial Sequence: Synthetic oligonucleotide
ttatttctcccttgtgtta

SEQ ID NO: 804 - RNA, 19 nt, synthetic construct
  source 1..19: mol_type = other RNA; note = Description of Artificial Sequence: Synthetic oligonucleotide
tcccaccttttcttctaat

SEQ ID NO: 805 - RNA, 19 nt, synthetic construct
  source 1..19: mol_type = other RNA; note = Description of Artificial Sequence: Synthetic oligonucleotide
tcgactttgagctggaaag

SEQ ID NO: 806 - RNA, 19 nt, synthetic construct
  source 1..19: mol_type = other RNA; note = Description of Artificial Sequence: Synthetic oligonucleotide
ctggaaagcagccgtttct

SEQ ID NO: 807 - RNA, 19 nt, synthetic construct
  source 1..19: mol_type = other RNA; note = Description of Artificial Sequence: Synthetic oligonucleotide
tggtctaagtgtgctgcat

SEQ ID NO: 808 - RNA, 19 nt, synthetic construct
  source 1..19: mol_type = other RNA; note = Description of Artificial Sequence: Synthetic oligonucleotide
gctgcatggagtgagcagt

SEQ ID NO: 809 - RNA, 19 nt, synthetic construct
  source 1..19: mol_type = other RNA; note = Description of Artificial Sequence: Synthetic oligonucleotide
tgagcagtagaagcctgca

SEQ ID NO: 810 - RNA, 19 nt, synthetic construct
  source 1..19: mol_type = other RNA; note = Description of Artificial Sequence: Synthetic oligonucleotide
ttagagaatgggggtggga

SEQ ID NO: 811 - RNA, 19 nt, synthetic construct
  source 1..19: mol_type = other RNA; note = Description of Artificial Sequence: Synthetic oligonucleotide
gggtggggaggcaagaaca

SEQ ID NO: 812 - RNA, 19 nt, synthetic construct
  source 1..19: mol_type = other RNA; note = Description of Artificial Sequence: Synthetic oligonucleotide
tgtttagcgcgggactact

SEQ ID NO: 813 - RNA, 19 nt, synthetic construct
  source 1..19: mol_type = other RNA; note = Description of Artificial Sequence: Synthetic oligonucleotide
ggactactgttccaaaaag

SEQ ID NO: 814 - RNA, 19 nt, synthetic construct
  source 1..19: mol_type = other RNA; note = Description of Artificial Sequence: Synthetic oligonucleotide
agcttgtttgtgaaacaaa

SEQ ID NO: 815 - RNA, 19 nt, synthetic construct
  source 1..19: mol_type = other RNA; note = Description of Artificial Sequence: Synthetic oligonucleotide
aaacaaaaaagtgttccct

SEQ ID NO: 816 - RNA, 19 nt, synthetic construct
  source 1..19: mol_type = other RNA; note = Description of Artificial Sequence: Synthetic oligonucleotide
ttttaaaattaaagtataa

SEQ ID NO: 817 - RNA, 19 nt, synthetic construct
  source 1..19: mol_type = other RNA; note = Description of Artificial Sequence: Synthetic oligonucleotide
ttttgcattgccttcggtt

SEQ ID NO: 818 - RNA, 19 nt, synthetic construct
  source 1..19: mol_type = other RNA; note = Description of Artificial Sequence: Synthetic oligonucleotide
ttcggtttgtatttagtgt

SEQ ID NO: 819 - RNA, 19 nt, synthetic construct
  source 1..19: mol_type = other RNA; note = Description of Artificial Sequence: Synthetic oligonucleotide
aacatgacctccgtgtagt

SEQ ID NO: 820 - RNA, 19 nt, synthetic construct
  source 1..19: mol_type = other RNA; note = Description of Artificial Sequence: Synthetic oligonucleotide
cagatgcttgtgattttta

SEQ ID NO: 821 - RNA, 19 nt, synthetic construct
  source 1..19: mol_type = other RNA; note = Description of Artificial Sequence: Synthetic oligonucleotide
tacgtgaaagatgcaagca

SEQ ID NO: 822 - RNA, 19 nt, synthetic construct
  source 1..19: mol_type = other RNA; note = Description of Artificial Sequence: Synthetic oligonucleotide
tgcaagcacctgaatttct

SEQ ID NO: 823 - RNA, 19 nt, synthetic construct
  source 1..19: mol_type = other RNA; note = Description of Artificial Sequence: Synthetic oligonucleotide
gaatttctgtttgaatgca

SEQ ID NO: 824 - RNA, 19 nt, synthetic construct
  source 1..19: mol_type = other RNA; note = Description of Artificial Sequence: Synthetic oligonucleotide
tttgaatgcggaaccataa

SEQ ID NO: 825 - RNA, 19 nt, synthetic construct
  source 1..19: mol_type = other RNA; note = Description of Artificial Sequence: Synthetic oligonucleotide
ttgtgttagtaataaacgt

SEQ ID NO: 826 - RNA, 19 nt, synthetic construct
  source 1..19: mol_type = other RNA; note = Description of Artificial Sequence: Synthetic oligonucleotide
ataaacgtcttgccacaat

SEQ ID NO: 827 - RNA, 19 nt, synthetic construct
  source 1..19: mol_type = other RNA; note = Description of Artificial Sequence: Synthetic oligonucleotide
tgccacaataagcctccaa

SEQ ID NO: 828 - RNA, 19 nt, synthetic construct
  source 1..19: mol_type = other RNA; note = Description of Artificial Sequence: Synthetic oligonucleotide
tttctgaccctgctgcccg

SEQ ID NO: 829 - RNA, 19 nt, synthetic construct
  source 1..19: mol_type = other RNA; note = Description of Artificial Sequence: Synthetic oligonucleotide
acacgggggccacttctga

SEQ ID NO: 830 - RNA, 19 nt, synthetic construct
  source 1..19: mol_type = other RNA; note = Description of Artificial Sequence: Synthetic oligonucleotide
tttgcttaggcaacacggg

SEQ ID NO: 831 - RNA, 19 nt, synthetic construct
  source 1..19: mol_type = other RNA; note = Description of Artificial Sequence: Synthetic oligonucleotide
tatgcaggccggaggtgca

SEQ ID NO: 832 - RNA, 19 nt, synthetic construct
  source 1..19: mol_type = other RNA; note = Description of Artificial Sequence: Synthetic oligonucleotide
taggccacagggacatgca

SEQ ID NO: 833 - RNA, 19 nt, synthetic construct
  source 1..19: mol_type = other RNA; note = Description of Artificial Sequence: Synthetic oligonucleotide
ttacccccaagaggccaca

SEQ ID NO: 834 - RNA, 19 nt, synthetic construct
  source 1..19: mol_type = other RNA; note = Description of Artificial Sequence: Synthetic oligonucleotide
tcacccaggccttctgacc

SEQ ID NO: 835 - RNA, 19 nt, synthetic construct
  source 1..19: mol_type = other RNA; note = Description of Artificial Sequence: Synthetic oligonucleotide
tcctgaggccaaccaccca

SEQ ID NO: 836 - RNA, 19 nt, synthetic construct
  source 1..19: mol_type = other RNA; note = Description of Artificial Sequence: Synthetic oligonucleotide
tgtgtgtgacagcctgagg

SEQ ID NO: 837 - RNA, 19 nt, synthetic construct
  source 1..19: mol_type = other RNA; note = Description of Artificial Sequence: Synthetic oligonucleotide
tcatctccctaggtgtgtg

SEQ ID NO: 838 - RNA, 19 nt, synthetic construct
  source 1..19: mol_type = other RNA; note = Description of Artificial Sequence: Synthetic oligonucleotide
taaacgggagcatctccct

SEQ ID NO: 839 - RNA, 19 nt, synthetic construct
  source 1..19: mol_type = other RNA; note = Description of Artificial Sequence: Synthetic oligonucleotide
tcaaggttcccagaaacgg

SEQ ID NO: 840 - RNA, 19 nt, synthetic construct
  source 1..19: mol_type = other RNA; note = Description of Artificial Sequence: Synthetic oligonucleotide
aggagtcggggccaaggtt

SEQ ID NO: 841 - RNA, 19 nt, synthetic construct
  source 1..19: mol_type = other RNA; note = Description of Artificial Sequence: Synthetic oligonucleotide
tcgaagtttgcaggagtcg

SEQ ID NO: 842 - RNA, 19 nt, synthetic construct
  source 1..19: mol_type = other RNA; note = Description of Artificial Sequence: Synthetic oligonucleotide
ttacacatttaccgaagtt

SEQ ID NO: 843 - RNA, 19 nt, synthetic construct
  source 1..19: mol_type = other RNA; note = Description of Artificial Sequence: Synthetic oligonucleotide
tgcagggtcgagttacaca

SEQ ID NO: 844 - RNA, 19 nt, synthetic construct
  source 1..19: mol_type = other RNA; note = Description of Artificial Sequence: Synthetic oligonucleotide
tagtgagccggtgcagggt

SEQ ID NO: 845 - RNA, 19 nt, synthetic construct
  source 1..19: mol_type = other RNA; note = Description of Artificial Sequence: Synthetic oligonucleotide
actgctgaacagagtgagc

SEQ ID NO: 846 - RNA, 19 nt, synthetic construct
  source 1..19: mol_type = other RNA; note = Description of Artificial Sequence: Synthetic oligonucleotide
tcagagtttcactgctgaa

SEQ ID NO: 847 - RNA, 19 nt, synthetic construct
  source 1..19: mol_type = other RNA; note = Description of Artificial Sequence: Synthetic oligonucleotide
agtgatcgatgcagagttt

SEQ ID NO: 848 - RNA, 19 nt, synthetic construct
  source 1..19: mol_type = other RNA; note = Description of Artificial Sequence: Synthetic oligonucleotide
taggaagtcttagtgatcg

SEQ ID NO: 849 - RNA, 19 nt, synthetic construct
  source 1..19: mol_type = other RNA; note = Description of Artificial Sequence: Synthetic oligonucleotide
acactcacgctgggacctc

SEQ ID NO: 850 - RNA, 19 nt, synthetic construct
  source 1..19: mol_type = other RNA; note = Description of Artificial Sequence: Synthetic oligonucleotide
agaaggacagatgccagaa

SEQ ID NO: 851 - RNA, 19 nt, synthetic construct
  source 1..19: mol_type = other RNA; note = Description of Artificial Sequence: Synthetic oligonucleotide
tcacaggctggccagaagg

SEQ ID NO: 852 - RNA, 19 nt, synthetic construct
  source 1..19: mol_type = other RNA; note = Description of Artificial Sequence: Synthetic oligonucleotide
tttggccagaccacaggct

SEQ ID NO: 853 - RNA, 19 nt, synthetic construct
  source 1..19: mol_type = other RNA; note = Description of Artificial Sequence: Synthetic oligonucleotide
agggttacatcacttggcc

SEQ ID NO: 854 - RNA, 19 nt, synthetic construct
  source 1..19: mol_type = other RNA; note = Description of Artificial Sequence: Synthetic oligonucleotide
tctggagaggagggttaca

SEQ ID NO: 855 - RNA, 19 nt, synthetic construct
  source 1..19: mol_type = other RNA; note = Description of Artificial Sequence: Synthetic oligonucleotide
tctgtgcacaggctggaga

SEQ ID NO: 856 - RNA, 19 nt, synthetic construct
  source 1..19: mol_type = other RNA; note = Description of Artificial Sequence: Synthetic oligonucleotide
ttcccaggctgcctgtgca

SEQ ID NO: 857 - RNA, 19 nt, synthetic construct
  source 1..19: mol_type = other RNA; note = Description of Artificial Sequence: Synthetic oligonucleotide
tgatggagctgttcccagg

SEQ ID NO: 858 - RNA, 19 nt, synthetic construct
  source 1..19: mol_type = other RNA; note = Description of Artificial Sequence: Synthetic oligonucleotide
tctgaggggtggggatgga

SEQ ID NO: 859 - RNA, 19 nt, synthetic construct
  source 1..19: mol_type = other RNA; note = Description of Artificial Sequence: Synthetic oligonucleotide
tcctatttatagctgaggg

SEQ ID NO: 860 - RNA, 19 nt, synthetic construct
  source 1..19: mol_type = other RNA; note = Description of Artificial Sequence: Synthetic oligonucleotide
tgtcacgatgccctattta

SEQ ID NO: 861 - RNA, 19 nt, synthetic construct
  source 1..19: mol_type = other RNA; note = Description of Artificial Sequence: Synthetic oligonucleotide
tccccggccgggtcacgat

SEQ ID NO: 862 - RNA, 19 nt, synthetic construct
  source 1..19: mol_type = other RNA; note = Description of Artificial Sequence: Synthetic oligonucleotide
tggcagcttcttcccccgg

SEQ ID NO: 863 - RNA, 19 nt, synthetic construct
  source 1..19: mol_type = other RNA; note = Description of Artificial Sequence: Synthetic oligonucleotide
acccagaacaacggcagct

SEQ ID NO: 864 - RNA, 19 nt, synthetic construct
  source 1..19: mol_type = other RNA; note = Description of Artificial Sequence: Synthetic oligonucleotide
tctgctgtagtacccagaa

SEQ ID NO: 865 - RNA, 19 nt, synthetic construct
  source 1..19: mol_type = other RNA; note = Description of Artificial Sequence: Synthetic oligonucleotide
tgcatacccttctgctgta

SEQ ID NO: 866 - RNA, 19 nt, synthetic construct
  source 1..19: mol_type = other RNA; note = Description of Artificial Sequence: Synthetic oligonucleotide
tggtgctcgcttccgcata

SEQ ID NO: 867 - RNA, 19 nt, synthetic construct
  source 1..19: mol_type = other RNA; note = Description of Artificial Sequence: Synthetic oligonucleotide
tctcagactggggtgctcg

SEQ ID NO: 868 - RNA, 19 nt, synthetic construct
  source 1..19: mol_type = other RNA; note = Description of Artificial Sequence: Synthetic oligonucleotide
aggctcacaccggcaggag

SEQ ID NO: 869 - RNA, 19 nt, synthetic construct
  source 1..19: mol_type = other RNA; note = Description of Artificial Sequence: Synthetic oligonucleotide
tgtggccctcaggctcaca

SEQ ID NO: 870 - RNA, 19 nt, synthetic construct
  source 1..19: mol_type = other RNA; note = Description of Artificial Sequence: Synthetic oligonucleotide
aggcagaggatggtggccc

SEQ ID NO: 871 - RNA, 19 nt, synthetic construct
  source 1..19: mol_type = other RNA; note = Description of Artificial Sequence: Synthetic oligonucleotide
agcccaggccaggaggcag

SEQ ID NO: 872 - RNA, 19 nt, synthetic construct
  source 1..19: mol_type = other RNA; note = Description of Artificial Sequence: Synthetic oligonucleotide
tcggtcacctgcagccagg

SEQ ID NO: 873 - RNA, 19 nt, synthetic construct
  source 1..19: mol_type = other RNA; note = Description of Artificial Sequence: Synthetic oligonucleotide
ttgtatgtacacccggtca

SEQ ID NO: 874 - RNA, 19 nt, synthetic construct
  source 1..19: mol_type = other RNA; note = Description of Artificial Sequence: Synthetic oligonucleotide
tgtggaaggggtgtatgta

SEQ ID NO: 875 - RNA, 19 nt, synthetic construct
  source 1..19: mol_type = other RNA; note = Description of Artificial Sequence: Synthetic oligonucleotide
tgtggatgacgaggtggaa

SEQ ID NO: 876 - RNA, 19 nt, synthetic construct
  source 1..19: mol_type = other RNA; note = Description of Artificial Sequence: Synthetic oligonucleotide
ttactctcattgtggatga

SEQ ID NO: 877 - RNA, 19 nt, synthetic construct
  source 1..19: mol_type = other RNA; note = Description of Artificial Sequence: Synthetic oligonucleotide
tttcccggcattggccttt

SEQ ID NO: 878 - RNA, 19 nt, synthetic construct
  source 1..19: mol_type = other RNA; note = Description of Artificial Sequence: Synthetic oligonucleotide
tggtctttgggcttcccgg

SEQ ID NO: 879 - RNA, 19 nt, synthetic construct
  source 1..19: mol_type = other RNA; note = Description of Artificial Sequence: Synthetic oligonucleotide
ttatgaaggtggggtcttt

SEQ ID NO: 880 - RNA, 19 nt, synthetic construct
  source 1..19: mol_type = other RNA; note = Description of Artificial Sequence: Synthetic oligonucleotide
attggagcaggtatgaagg

SEQ ID NO: 881 - RNA, 19 nt, synthetic construct
  source 1..19: mol_type = other RNA; note = Description of Artificial Sequence: Synthetic oligonucleotide
ttcttggcctgaattggag

SEQ ID NO: 882 - RNA, 19 nt, synthetic construct
  source 1..19: mol_type = other RNA; note = Description of Artificial Sequence: Synthetic oligonucleotide
acaggggatgtcttggcct

SEQ ID NO: 883 - RNA, 19 nt, synthetic construct
  source 1..19: mol_type = other RNA; note = Description of Artificial Sequence: Synthetic oligonucleotide
tcttttcatccacagggga

SEQ ID NO: 884 - RNA, 19 nt, synthetic construct
  source 1..19: mol_type = other RNA; note = Description of Artificial Sequence: Synthetic oligonucleotide
tggtcctgtagggcctttt

SEQ ID NO: 885 - RNA, 19 nt, synthetic construct
  source 1..19: mol_type = other RNA; note = Description of Artificial Sequence: Synthetic oligonucleotide
agcaccagctggtcctgta

SEQ ID NO: 886 - RNA, 19 nt, synthetic construct
  source 1..19: mol_type = other RNA; note = Description of Artificial Sequence: Synthetic oligonucleotide
aacttgtcttcggtgtcaa

SEQ ID NO: 887 - RNA, 19 nt, synthetic construct
  source 1..19: mol_type = other RNA; note = Description of Artificial Sequence: Synthetic oligonucleotide
attgcggccctcaacttgt

SEQ ID NO: 888 - RNA, 19 nt, synthetic construct
  source 1..19: mol_type = other RNA; note = Description of Artificial Sequence: Synthetic oligonucleotide
tcatcccgaccattgcggc

SEQ ID NO: 889 - RNA, 19 nt, synthetic construct
  source 1..19: mol_type = other RNA; note = Description of Artificial Sequence: Synthetic oligonucleotide
taagttggccagcatcccg

SEQ ID NO: 890 - RNA, 19 nt, synthetic construct
  source 1..19: mol_type = other RNA; note = Description of Artificial Sequence: Synthetic oligonucleotide
acggaagcccaagaagttg

SEQ ID NO: 891 - RNA, 19 nt, synthetic construct
  source 1..19: mol_type = other RNA; note = Description of Artificial Sequence: Synthetic oligonucleotide
tgccatatatacggaagcc

SEQ ID NO: 892 - RNA, 19 nt, synthetic construct
  source 1..19: mol_type = other RNA; note = Description of Artificial Sequence: Synthetic oligonucleotide
tctcactgtgcatgccata

SEQ ID NO: 893 - RNA, 19 nt, synthetic construct
  source 1..19: mol_type = other RNA; note = Description of Artificial Sequence: Synthetic oligonucleotide
acgccccatagctcactgt

SEQ ID NO: 894 - RNA, 19 nt, synthetic construct
  source 1..19: mol_type = other RNA; note = Description of Artificial Sequence: Synthetic oligonucleotide
agccgttggggagaggacg

SEQ ID NO: 895 - RNA, 19 nt, synthetic construct
  source 1..19: mol_type = other RNA; note = Description of Artificial Sequence: Synthetic oligonucleotide
tagaggccagggtgccaaa

SEQ ID NO: 896 - RNA, 19 nt, synthetic construct
  source 1..19: mol_type = other RNA; note = Description of Artificial Sequence: Synthetic oligonucleotide
tcagatagagagaggccag

SEQ ID NO: 897 - RNA, 19 nt, synthetic construct
  source 1..19: mol_type = other RNA; note = Description of Artificial Sequence: Synthetic oligonucleotide
tgtccaaggctcccagata

SEQ ID NO: 898 - RNA, 19 nt, synthetic construct
  source 1..19: mol_type = other RNA; note = Description of Artificial Sequence: Synthetic oligonucleotide
tgtcagctgtgtggtccaa

SEQ ID NO: 899 - RNA, 19 nt, synthetic construct
  source 1..19: mol_type = other RNA; note = Description of Artificial Sequence: Synthetic oligonucleotide
tctgtagcctgtcagctgt

SEQ ID NO: 900 - RNA, 19 nt, synthetic construct
  source 1..19: mol_type = other RNA; note = Description of Artificial Sequence: Synthetic oligonucleotide
acacccaggattgcctgta

SEQ ID NO: 901 - RNA, 19 nt, synthetic construct
  source 1..19: mol_type = other RNA; note = Description of Artificial Sequence: Synthetic oligonucleotide
ttccaaggaacacccagga

SEQ ID NO: 902 - RNA, 19 nt, synthetic construct
  source 1..19: mol_type = other RNA; note = Description of Artificial Sequence: Synthetic oligonucleotide
tcagttcttgtccttccaa

SEQ ID NO: 903 - RNA, 19 nt, synthetic construct
  source 1..19: mol_type = other RNA; note = Description of Artificial Sequence: Synthetic oligonucleotide
agccgggaggtgcagttct

SEQ ID NO: 904 - RNA, 19 nt, synthetic construct
  source 1..19: mol_type = other RNA; note = Description of Artificial Sequence: Synthetic oligonucleotide
agacaggaccttgtgcgca

SEQ ID NO: 905 - RNA, 19 nt, synthetic construct
  source 1..19: mol_type = other RNA; note = Description of Artificial Sequence: Synthetic oligonucleotide
tgccctgtacagcctgcag

SEQ ID NO: 906 - RNA, 19 nt, synthetic construct
  source 1..19: mol_type = other RNA; note = Description of Artificial Sequence: Synthetic oligonucleotide
tccactagcaggccctgta

SEQ ID NO: 907 - RNA, 19 nt, synthetic construct
  source 1..19: mol_type = other RNA; note = Description of Artificial Sequence: Synthetic oligonucleotide
tccctgccctgggccacta

SEQ ID NO: 908 - RNA, 19 nt, synthetic construct
  source 1..19: mol_type = other RNA; note = Description of Artificial Sequence: Synthetic oligonucleotide
tggctatcagccctgccct

SEQ ID NO: 909 - RNA, 19 nt, synthetic construct
  source 1..19: mol_type = other RNA; note = Description of Artificial Sequence: Synthetic oligonucleotide
tagcagctgggcctggcta

SEQ ID NO: 910 - RNA, 19 nt, synthetic construct
  source 1..19: mol_type = other RNA; note = Description of Artificial Sequence: Synthetic oligonucleotide
accgtggacagcagcagct

SEQ ID NO: 911 - RNA, 19 nt, synthetic construct
  source 1..19: mol_type = other RNA; note = Description of Artificial Sequence: Synthetic oligonucleotide
tgggctgtgaacacgccca

SEQ ID NO: 912 - RNA, 19 nt, synthetic construct
  source 1..19: mol_type = other RNA; note = Description of Artificial Sequence: Synthetic oligonucleotide
ttgcaggcctggggctgtg

SEQ ID NO: 913 - RNA, 19 nt, synthetic construct
  source 1..19: mol_type = other RNA; note = Description of Artificial Sequence: Synthetic oligonucleotide
acggctgcttcaggtgcag

SEQ ID NO: 914 - RNA, 19 nt, synthetic construct
  source 1..19: mol_type = other RNA; note = Description of Artificial Sequence: Synthetic oligonucleotide
tcctgcacaaacggctgct

SEQ ID NO: 915 - RNA, 19 nt, synthetic construct
  source 1..19: mol_type = other RNA; note = Description of Artificial Sequence: Synthetic oligonucleotide
tagagagccaggccctgca

SEQ ID NO: 916 - RNA, 19 nt, synthetic construct
  source 1..19: mol_type = other RNA; note = Description of Artificial Sequence: Synthetic oligonucleotide
acaggggtatagagagcca

SEQ ID NO: 917 - RNA, 19 nt, synthetic construct
  source 1..19: mol_type = other RNA; note = Description of Artificial Sequence: Synthetic oligonucleotide
ttgggaggaccacaggggt

SEQ ID NO: 918 - RNA, 19 nt, synthetic construct
  source 1..19: mol_type = other RNA; note = Description of Artificial Sequence: Synthetic oligonucleotide
tcagttctgtgaagtccag

SEQ ID NO: 919 - RNA, 19 nt, synthetic construct
  source 1..19: mol_type = other RNA; note = Description of Artificial Sequence: Synthetic oligonucleotide
agcagcaacatccagttct

SEQ ID NO: 920 - RNA, 19 nt, synthetic construct
  source 1..19: mol_type = other RNA; note = Description of Artificial Sequence: Synthetic oligonucleotide
tcaatcttctcagcagcaa

SEQ ID NO: 921 - RNA, 19 nt, synthetic construct
  source 1..19: mol_type = other RNA; note = Description of Artificial Sequence: Synthetic oligonucleotide
atgaacctgtcaatcttct

SEQ ID NO: 922 - RNA, 19 nt, synthetic construct
  source 1..19: mol_type = other RNA; note = Description of Artificial Sequence: Synthetic oligonucleotide
tcacagcctgcatgaacct

SEQ ID NO: 923 - RNA, 19 nt, synthetic construct
  source 1..19: mol_type = other RNA; note = Description of Artificial Sequence: Synthetic oligonucleotide
tcttccatcctgtcacagc

SEQ ID NO: 924 - RNA, 19 nt, synthetic construct
  source 1..19: mol_type = other RNA; note = Description of Artificial Sequence: Synthetic oligonucleotide
tggagcagccagtcttcca

SEQ ID NO: 925 - RNA, 19 nt, synthetic construct
  source 1..19: mol_type = other RNA; note = Description of Artificial Sequence: Synthetic oligonucleotide
tgtccacactggctcccat

SEQ ID NO: 926 - RNA, 19 nt, synthetic construct
  source 1..19: mol_type = other RNA; note = Description of Artificial Sequence: Synthetic oligonucleotide
agccagggtgctgtccaca

SEQ ID NO: 927 - RNA, 19 nt, synthetic construct
  source 1..19: mol_type = other RNA; note = Description of Artificial Sequence: Synthetic oligonucleotide
ttaggtgttgaaagccagg

SEQ ID NO: 928 - RNA, 19 nt, synthetic construct
  source 1..19: mol_type = other RNA; note = Description of Artificial Sequence: Synthetic oligonucleotide
taagtggacgtaggtgttg

SEQ ID NO: 929 - RNA, 19 nt, synthetic construct
  source 1..19: mol_type = other RNA; note = Description of Artificial Sequence: Synthetic oligonucleotide
tcatcttcccttggaagtg

SEQ ID NO: 930 - RNA, 19 nt, synthetic construct
  source 1..19: mol_type = other RNA; note = Description of Artificial Sequence: Synthetic oligonucleotide
agaagcccttcatcttccc

SEQ ID NO: 931 - RNA, 19 nt, synthetic construct
  source 1..19: mol_type = other RNA; note = Description of Artificial Sequence: Synthetic oligonucleotide
tcggccagcagggagaagc

SEQ ID NO: 932 - RNA, 19 nt, synthetic construct
  source 1..19: mol_type = other RNA; note = Description of Artificial Sequence: Synthetic oligonucleotide
ttccacccagaactcctgg

SEQ ID NO: 933 - RNA, 19 nt, synthetic construct
  source 1..19: mol_type = other RNA; note = Description of Artificial Sequence: Synthetic oligonucleotide
aggtgctgttgtccaccca

SEQ ID NO: 934 - RNA, 19 nt, synthetic construct
  source 1..19: mol_type = other RNA; note = Description of Artificial Sequence: Synthetic oligonucleotide
acagacactgaggtgctgt

SEQ ID NO: 935 - RNA, 19 nt, synthetic construct
  source 1..19: mol_type = other RNA; note = Description of Artificial Sequence: Synthetic oligonucleotide
tagagcatgggaacagaca

SEQ ID NO: 936 - RNA, 19 nt, synthetic construct
  source 1..19: mol_type = other RNA; note = Description of Artificial Sequence: Synthetic oligonucleotide
tcccatgccagagagcatg

SEQ ID NO: 937 - RNA, 19 nt, synthetic construct
  source 1..19: mol_type = other RNA; note = Description of Artificial Sequence: Synthetic oligonucleotide
agtgctggaaggtgcccat

SEQ ID NO: 938 - RNA, 19 nt, synthetic construct
  source 1..19: mol_type = other RNA; note = Description of Artificial Sequence: Synthetic oligonucleotide
tgtcactccagtgctggaa

SEQ ID NO: 939 - RNA, 19 nt, synthetic construct
  source 1..19: mol_type = other RNA; note = Description of Artificial Sequence: Synthetic oligonucleotide
ttcaccgagaagttgtcct

SEQ ID NO: 940 - RNA, 19 nt, synthetic construct
  source 1..19: mol_type = other RNA; note = Description of Artificial Sequence: Synthetic oligonucleotide
agggcacttgagtcaccga

SEQ ID NO: 941 - RNA, 19 nt, synthetic construct
  source 1..19: mol_type = other RNA; note = Description of Artificial Sequence: Synthetic oligonucleotide
tcgctctcagtgaagggca

SEQ ID NO: 942 - RNA, 19 nt, synthetic construct
  source 1..19: mol_type = other RNA; note = Description of Artificial Sequence: Synthetic oligonucleotide
tagcaggcaggcgctctca

SEQ ID NO: 943 - RNA, 19 nt, synthetic construct
  source 1..19: mol_type = other RNA; note = Description of Artificial Sequence: Synthetic oligonucleotide
aggctggatcagcagcagg

SEQ ID NO: 944 - RNA, 19 nt, synthetic construct
  source 1..19: mol_type = other RNA; note = Description of Artificial Sequence: Synthetic oligonucleotide
aggcatagtgaggctggat

SEQ ID NO: 945 - RNA, 19 nt, synthetic construct
  source 1..19: mol_type = other RNA; note = Description of Artificial Sequence: Synthetic oligonucleotide
tgtccaggtcagaggcata

SEQ ID NO: 946 - RNA, 19 nt, synthetic construct
  source 1..19: mol_type = other RNA; note = Description of Artificial Sequence: Synthetic oligonucleotide
tcctccaccttgtccaggt

SEQ ID NO: 947 - RNA, 19 nt, synthetic construct
  source 1..19: mol_type = other RNA; note = Description of Artificial Sequence: Synthetic oligonucleotide
tggaaagtgagaccctcca

SEQ ID NO: 948 - RNA, 19 nt, synthetic construct
  source 1..19: mol_type = other RNA; note = Description of Artificial Sequence: Synthetic oligonucleotide
tgagttttgctggaaagtg

SEQ ID NO: 949 - RNA, 19 nt, synthetic construct
  source 1..19: mol_type = other RNA; note = Description of Artificial Sequence: Synthetic oligonucleotide
atccagttgagggagtttt

SEQ ID NO: 950 - RNA, 19 nt, synthetic construct
  source 1..19: mol_type = other RNA; note = Description of Artificial Sequence: Synthetic oligonucleotide
atagtttcttcatccagtt

SEQ ID NO: 951 - RNA, 19 nt, synthetic construct
  source 1..19: mol_type = other RNA; note = Description of Artificial Sequence: Synthetic oligonucleotide
tggtccggggagatagttt

SEQ ID NO: 952 - RNA, 19 nt, synthetic construct
  source 1..19: mol_type = other RNA; note = Description of Artificial Sequence: Synthetic oligonucleotide
tgtcaggtggatggtccgg

SEQ ID NO: 953 - RNA, 19 nt, synthetic construct
  source 1..19: mol_type = other RNA; note = Description of Artificial Sequence: Synthetic oligonucleotide
tgcagcaccagttggggca

SEQ ID NO: 954 - RNA, 19 nt, synthetic construct
  source 1..19: mol_type = other RNA; note = Description of Artificial Sequence: Synthetic oligonucleotide
tcataagatccttgcagca

SEQ ID NO: 955 - RNA, 19 nt, synthetic construct
  source 1..19: mol_type = other RNA; note = Description of Artificial Sequence: Synthetic oligonucleotide
tgtcctgcaggtcataaga

SEQ ID NO: 956 - RNA, 19 nt, synthetic construct
  source 1..19: mol_type = other RNA; note = Description of Artificial Sequence: Synthetic oligonucleotide
tgggcgagcaggtcctgca

SEQ ID NO: 957 - RNA, 19 nt, synthetic construct
  source 1..19: mol_type = other RNA; note = Description of Artificial Sequence: Synthetic oligonucleotide
tgcagctcagcctgggcga

SEQ ID NO: 958 - RNA, 19 nt, synthetic construct
  source 1..19: mol_type = other RNA; note = Description of Artificial Sequence: Synthetic oligonucleotide
tagaatggcgggcagctca

SEQ ID NO: 959 - RNA, 19 nt, synthetic construct
  source 1..19: mol_type = other RNA; note = Description of Artificial Sequence: Synthetic oligonucleotide
tcattgctcaatttttgca

SEQ ID NO: 960 - RNA, 19 nt, synthetic construct
  source 1..19: mol_type = other RNA; note = Description of Artificial Sequence: Synthetic oligonucleotide
tcctgatgcggtcattgct

SEQ ID NO: 961 - RNA, 19 nt, synthetic construct
  source 1..19: mol_type = other RNA; note = Description of Artificial Sequence: Synthetic oligonucleotide
tacctcccccaccctgatg

SEQ ID NO: 962 - RNA, 19 nt, synthetic construct
  source 1..19: mol_type = other RNA; note = Description of Artificial Sequence: Synthetic oligonucleotide
tgctgttcagcacctcccc

SEQ ID NO: 963 - RNA, 19 nt, synthetic construct
  source 1..19: mol_type = other RNA; note = Description of Artificial Sequence: Synthetic oligonucleotide
tctcaaaaaaaatgctgtt

SEQ ID NO: 964 - RNA, 19 nt, synthetic construct
  source 1..19: mol_type = other RNA; note = Description of Artificial Sequence: Synthetic oligonucleotide
tccgcttcaagctcaaaaa

SEQ ID NO: 965 - RNA, 19 nt, synthetic construct
  source 1..19: mol_type = other RNA; note = Description of Artificial Sequence: Synthetic oligonucleotide
aagctgttgggtagactct

SEQ ID NO: 966 - RNA, 19 nt, synthetic construct
  source 1..19: mol_type = other RNA; note = Description of Artificial Sequence: Synthetic oligonucleotide
taggcttgttaagctgttg

SEQ ID NO: 967 - RNA, 19 nt, synthetic construct
  source 1..19: mol_type = other RNA; note = Description of Artificial Sequence: Synthetic oligonucleotide
ttccaagacctcaggcttg

SEQ ID NO: 968 - RNA, 19 nt, synthetic construct
  source 1..19: mol_type = other RNA; note = Description of Artificial Sequence: Synthetic oligonucleotide
tttcagggtcacctccaag

SEQ ID NO: 969 - RNA, 19 nt, synthetic construct
  source 1..19: mol_type = other RNA; note = Description of Artificial Sequence: Synthetic oligonucleotide
tgaatgggcggttcagggt

SEQ ID NO: 970 - RNA, 19 nt, synthetic construct
  source 1..19: mol_type = other RNA; note = Description of Artificial Sequence: Synthetic oligonucleotide
acagcaaacaggaatgggc

SEQ ID NO: 971 - RNA, 19 nt, synthetic construct
  source 1..19: mol_type = other RNA; note = Description of Artificial Sequence: Synthetic oligonucleotide
tcacgcggcccaggaagtg

SEQ ID NO: 972 - RNA, 19 nt, synthetic construct
  source 1..19: mol_type = other RNA; note = Description of Artificial Sequence: Synthetic oligonucleotide
tcagcgggttggccacgcg

SEQ ID NO: 973 - RNA, 19 nt, synthetic construct
  source 1..19: mol_type = other RNA; note = Description of Artificial Sequence: Synthetic oligonucleotide
tatgctgtgctcagcgggt

SEQ ID NO: 974 - RNA, 19 nt, synthetic construct
  source 1..19: mol_type = other RNA; note = Description of Artificial Sequence: Synthetic oligonucleotide
tgccctggcctcatgctgt

SEQ ID NO: 975 - RNA, 19 nt, synthetic construct
  source 1..19: mol_type = other RNA; note = Description of Artificial Sequence: Synthetic oligonucleotide
actgtgttctggggccctg

SEQ ID NO: 976 - RNA, 19 nt, synthetic construct
  source 1..19: mol_type = other RNA; note = Description of Artificial Sequence: Synthetic oligonucleotide
ttcaaaggccaggggcaga

SEQ ID NO: 977 - RNA, 19 nt, synthetic construct
  source 1..19: mol_type = other RNA; note = Description of Artificial Sequence: Synthetic oligonucleotide
tgctggcctttgcctcaaa

SEQ ID NO: 978 - RNA, 19 nt, synthetic construct
  source 1..19: mol_type = other RNA; note = Description of Artificial Sequence: Synthetic oligonucleotide
tgttatctgctgctggcct

SEQ ID NO: 979 - RNA, 19 nt, synthetic construct
  source 1..19: mol_type = other RNA; note = Description of Artificial Sequence: Synthetic oligonucleotide
ttgtccggggttgttatct

SEQ ID NO: 980 - RNA, 19 nt, synthetic construct
  source 1..19: mol_type = other RNA; note = Description of Artificial Sequence: Synthetic oligonucleotide
acatcgctgatttgtccgg

SEQ ID NO: 981 - RNA, 19 nt, synthetic construct
  source 1..19: mol_type = other RNA; note = Description of Artificial Sequence: Synthetic oligonucleotide
ttgggggtgacacatcgct

SEQ ID NO: 982 - RNA, 19 nt, synthetic construct
  source 1..19: mol_type = other RNA; note = Description of Artificial Sequence: Synthetic oligonucleotide
taaagtcgactcattagaa

SEQ ID NO: 983 - RNA, 19 nt, synthetic construct
  source 1..19: mol_type = other RNA; note = Description of Artificial Sequence: Synthetic oligonucleotide
acttagaccaaggagaaac

SEQ ID NO: 984 - RNA, 19 nt, synthetic construct
  source 1..19: mol_type = other RNA; note = Description of Artificial Sequence: Synthetic oligonucleotide
atttgtgccgctgcaggct

SEQ ID NO: 985 - RNA, 19 nt, synthetic construct
  source 1..19: mol_type = other RNA; note = Description of Artificial Sequence: Synthetic oligonucleotide
actgggaggtgcatttgtg

SEQ ID NO: 986 - RNA, 19 nt, synthetic construct
  source 1..19: mol_type = other RNA; note = Description of Artificial Sequence: Synthetic oligonucleotide
acccagcaaactgggaggt

SEQ ID NO: 987 - RNA, 19 nt, synthetic construct
  source 1..19: mol_type = other RNA; note = Description of Artificial Sequence: Synthetic oligonucleotide
ttctaaaataaacccagca

SEQ ID NO: 988 - RNA, 19 nt, synthetic construct
  source 1..19: mol_type = other RNA; note = Description of Artificial Sequence: Synthetic oligonucleotide
tgctaaacactggttcttg

SEQ ID NO: 989 - RNA, 19 nt, synthetic construct
  source 1..19: mol_type = other RNA; note = Description of Artificial Sequence: Synthetic oligonucleotide
aacttgaaaagggaacact

SEQ ID NO: 990 - RNA, 19 nt, synthetic construct
  source 1..19: mol_type = other RNA; note = Description of Artificial Sequence: Synthetic oligonucleotide
tttttgttctcaacttgaa

SEQ ID NO: 991 - RNA, 19 nt, synthetic construct
  source 1..19: mol_type = other RNA; note = Description of Artificial Sequence: Synthetic oligonucleotide
ttttaaaacccaatttttg

SEQ ID NO: 992 - RNA, 19 nt, synthetic construct
  source 1..19: mol_type = other RNA; note = Description of Artificial Sequence: Synthetic oligonucleotide
atgcaaaaatgtatacttt

SEQ ID NO: 993 - RNA, 19 nt, synthetic construct
  source 1..19: mol_type = other RNA; note = Description of Artificial Sequence: Synthetic oligonucleotide
ttacattcaagacactaaa

SEQ ID NO: 994 - RNA, 19 nt, synthetic construct
  source 1..19: mol_type = other RNA; note = Description of Artificial Sequence: Synthetic oligonucleotide
aggtcatgttcttacattc

SEQ ID NO: 995 - RNA, 19 nt, synthetic construct
  source 1..19: mol_type = other RNA; note = Description of Artificial Sequence: Synthetic oligonucleotide
aggtattacagacactaca

SEQ ID NO: 996 - RNA, 19 nt, synthetic construct
  source 1..19: mol_type = other RNA; note = Description of Artificial Sequence: Synthetic oligonucleotide
aaaaaactaaggtattaca

SEQ ID NO: 997 - RNA, 19 nt, synthetic construct
  source 1..19: mol_type = other RNA; note = Description of Artificial Sequence: Synthetic oligonucleotide
taagcatctgtggaaaaaa

SEQ ID NO: 998 - RNA, 19 nt, synthetic construct
  source 1..19: mol_type = other RNA; note = Description of Artificial Sequence: Synthetic oligonucleotide
ttcacgtattgttcaaaaa

SEQ ID NO: 999 - RNA, 19 nt, synthetic construct
  source 1..19: mol_type = other RNA; note = Description of Artificial Sequence: Synthetic oligonucleotide
agaaataaccagctatggt

SEQ ID NO: 1000 - RNA, 19 nt, synthetic construct
  source 1..19: mol_type = other RNA; note = Description of Artificial Sequence: Synthetic oligonucleotide
taacacaagggagaaataa

SEQ ID NO: 1001 - RNA, 19 nt, synthetic construct
  source 1..19: mol_type = other RNA; note = Description of Artificial Sequence: Synthetic oligonucleotide
attagaagaaaaggtggga

SEQ ID NO: 1002 - RNA, 19 nt, synthetic construct
  source 1..19: mol_type = other RNA; note = Description of Artificial Sequence: Synthetic oligonucleotide
ctttccagctcaaagtcga

SEQ ID NO: 1003 - RNA, 19 nt, synthetic construct
  source 1..19: mol_type = other RNA; note = Description of Artificial Sequence: Synthetic oligonucleotide
agaaacggctgctttccag

SEQ ID NO: 1004 - RNA, 19 nt, synthetic construct
  source 1..19: mol_type = other RNA; note = Description of Artificial Sequence: Synthetic oligonucleotide
atgcagcacacttagacca

SEQ ID NO: 1005 - RNA, 19 nt, synthetic construct
  source 1..19: mol_type = other RNA; note = Description of Artificial Sequence: Synthetic oligonucleotide
actgctcactccatgcagc

SEQ ID NO: 1006 - RNA, 19 nt, synthetic construct
  source 1..19: mol_type = other RNA; note = Description of Artificial Sequence: Synthetic oligonucleotide
tgcaggcttctactgctca

SEQ ID NO: 1007 - RNA, 19 nt, synthetic construct
  source 1..19: mol_type = other RNA; note = Description of Artificial Sequence: Synthetic oligonucleotide
tcccacccccattctctaa

SEQ ID NO: 1008 - RNA, 19 nt, synthetic construct
  source 1..19: mol_type = other RNA; note = Description of Artificial Sequence: Synthetic oligonucleotide
tgttcttgcctccccaccc

SEQ ID NO: 1009 - RNA, 19 nt, synthetic construct
  source 1..19: mol_type = other RNA; note = Description of Artificial Sequence: Synthetic oligonucleotide
agtagtcccgcgctaaaca

SEQ ID NO: 1010 - RNA, 19 nt, synthetic construct
  source 1..19: mol_type = other RNA; note = Description of Artificial Sequence: Synthetic oligonucleotide
ctttttggaacagtagtcc

SEQ ID NO: 1011 - RNA, 19 nt, synthetic construct
  source 1..19: mol_type = other RNA; note = Description of Artificial Sequence: Synthetic oligonucleotide
tttgtttcacaaacaagct

SEQ ID NO: 1012 - RNA, 19 nt, synthetic construct
  source 1..19: mol_type = other RNA; note = Description of Artificial Sequence: Synthetic oligonucleotide
agggaacacttttttgttt

SEQ ID NO: 1013 - RNA, 19 nt, synthetic construct
  source 1..19: mol_type = other RNA; note = Description of Artificial Sequence: Synthetic oligonucleotide
ttatactttaattttaaaa

SEQ ID NO: 1014 - RNA, 19 nt, synthetic construct
  source 1..19: mol_type = other RNA; note = Description of Artificial Sequence: Synthetic oligonucleotide
aaccgaaggcaatgcaaaa

SEQ ID NO: 1015 - RNA, 19 nt, synthetic construct
  source 1..19: mol_type = other RNA; note = Description of Artificial Sequence: Synthetic oligonucleotide
acactaaatacaaaccgaa

SEQ ID NO: 1016 - RNA, 19 nt, synthetic construct
  source 1..19: mol_type = other RNA; note = Description of Artificial Sequence: Synthetic oligonucleotide
actacacggaggtcatgtt

SEQ ID NO: 1017 - RNA, 19 nt, synthetic construct
  source 1..19: mol_type = other RNA; note = Description of Artificial Sequence: Synthetic oligonucleotide
taaaaatcacaagcatctg

SEQ ID NO: 1018 - RNA, 19 nt, synthetic construct
  source 1..19: mol_type = other RNA; note = Description of Artificial Sequence: Synthetic oligonucleotide
tgcttgcatctttcacgta

SEQ ID NO: 1019 - RNA, 19 nt, synthetic construct
  source 1..19: mol_type = other RNA; note = Description of Artificial Sequence: Synthetic oligonucleotide
agaaattcaggtgcttgca

SEQ ID NO: 1020 - RNA, 19 nt, synthetic construct
  source 1..19: mol_type = other RNA; note = Description of Artificial Sequence: Synthetic oligonucleotide
tgcattcaaacagaaattc

SEQ ID NO: 1021 - RNA, 19 nt, synthetic construct
  source 1..19: mol_type = other RNA; note = Description of Artificial Sequence: Synthetic oligonucleotide
ttatggttccgcattcaaa

SEQ ID NO: 1022 - RNA, 19 nt, synthetic construct
  source 1..19: mol_type = other RNA; note = Description of Artificial Sequence: Synthetic oligonucleotide
acgtttattactaacacaa

SEQ ID NO: 1023 - RNA, 19 nt, synthetic construct
  source 1..19: mol_type = other RNA; note = Description of Artificial Sequence: Synthetic oligonucleotide
attgtggcaagacgtttat

SEQ ID NO: 1024 - RNA, 19 nt, synthetic construct
  source 1..19: mol_type = other RNA; note = Description of Artificial Sequence: Synthetic oligonucleotide
ttggaggcttattgtggca

SEQ ID NO: 1025 - RNA, 21 nt, synthetic construct
  source 1..21: mol_type = other RNA; note = Description of Artificial Sequence: Synthetic oligonucleotide
  modified_base 1: mod_base = OTHER; note = 2'-O-methyluridine-3'-phosphorothioate
  modified_base 2: mod_base = OTHER; note = 2'-O-methylcytidine-3'- phosphorothioate
  modified_base 3: mod_base = OTHER; note = 2'-O-methyluridine-3'-phosphate
  modified_base 4: mod_base = OTHER; note = 2'-O-methylcytidine-3'-phosphate
  modified_base 5: mod_base = OTHER; note = 2'-O-methylcytidine-3'-phosphate
  modified_base 6: mod_base = OTHER; note = 2'-O-methylcytidine-3'-phosphate
  modified_base 7: mod_base = OTHER; note = 2'-fluoroadenosine-3'-phosphate
  modified_base 8: mod_base = OTHER; note = 2'-O-methylcytidine-3'-phosphate
  modified_base 9: mod_base = OTHER; note = 2'-fluorocytidine-3'-phosphate
  modified_base 10: mod_base = OTHER; note = 2'-fluorouridine-3'-phosphate
  modified_base 11: mod_base = OTHER; note = 2'-fluorouridine-3'-phosphate
  modified_base 12: mod_base = OTHER; note = 2'-O-methyluridine-3'-phosphate
  modified_base 13: mod_base = OTHER; note = 2'-O-methyluridine-3'-phosphate
  modified_base 14: mod_base = OTHER; note = 2'-O-methylcytidine-3'-phosphate
  modified_base 15: mod_base = OTHER; note = 2'-O-methyluridine-3'-phosphate
  modified_base 16: mod_base = OTHER; note = 2'-O-methyluridine-3'-phosphate
  modified_base 17: mod_base = OTHER; note = 2'-O-methylcytidine-3'-phosphate
  modified_base 18: mod_base = OTHER; note = 2'-O-methyluridine-3'-phosphate
  modified_base 19: mod_base = OTHER; note = 2'-O-methyladenosine-3'-phosphate
  modified_base 20: mod_base = OTHER; note = 2'-O-methyladenosine-3'-phosphate
  modified_base 21: mod_base = OTHER; note = 2'-O-methyluridine-3'-phosphate N-[tris(GalNAc-alkyl)-amidodecanoyl)]-4-hydroxyprolinol Hyp-(GalNAc-alkyl)3
tctcccaccttttcttctaat

SEQ ID NO: 1026 - RNA, 23 nt, synthetic construct
  source 1..23: mol_type = other RNA; note = Description of Artificial Sequence: Synthetic oligonucleotide
  modified_base 1: mod_base = OTHER; note = 2'-O-methyladenosine-3'- phosphorothioate
  modified_base 2: mod_base = OTHER; note = 2'-fluorouridine -3'-phosphorothioate
  modified_base 3: mod_base = OTHER; note = 2'-O-methyluridine-3'-phosphate
  modified_base 4: mod_base = OTHER; note = 2'-O-methyladenosine-3'-phosphate
  modified_base 5: mod_base = OTHER; note = 2'-O-methylguanosine-3'-phosphate
  modified_base 6: mod_base = OTHER; note = 2'-fluoroadenosine-3'-phosphate
  modified_base 7: mod_base = OTHER; note = 2'-O-methyladenosine-3'-phosphate
  modified_base 8: mod_base = OTHER; note = 2'-O-methylguanosine-3'-phosphate
  modified_base 9: mod_base = OTHER; note = 2'-O-methyladenosine-3'-phosphate
  modified_base 10: mod_base = OTHER; note = 2'-O-methyladenosine-3'-phosphate
  modified_base 11: mod_base = OTHER; note = 2'-O-methyladenosine-3'-phosphate
  modified_base 12: mod_base = OTHER; note = 2'-O-methyladenosine-3'-phosphate
  modified_base 13: mod_base = OTHER; note = 2'-O-methylguanosine-3'-phosphate
  modified_base 14: mod_base = OTHER; note = 2'-fluoroguanosine-3'-phosphate
  modified_base 15: mod_base = OTHER; note = 2'-O-methyluridine-3'-phosphate
  modified_base 16: mod_base = OTHER; note = 2'-fluoroguanosine-3'-phosphate
  modified_base 17: mod_base = OTHER; note = 2'-O-methylguanosine-3'-phosphate
  modified_base 18: mod_base = OTHER; note = 2'-O-methylguanosine-3'-phosphate
  modified_base 19: mod_base = OTHER; note = 2'-O-methyladenosine-3'-phosphate
  modified_base 20: mod_base = OTHER; note = 2'-O-methylguanosine-3'-phosphate
  modified_base 21: mod_base = OTHER; note = 2'-O-methyladenosine-3'- phosphorothioate
  modified_base 22: mod_base = OTHER; note = 2'-O-methylcytidine-3'- phosphorothioate
  modified_base 23: mod_base = OTHER; note = 2'-O-methyluridine-3'-phosphate
attagaagaaaaggtgggagact

SEQ ID NO: 1027 - RNA, 21 nt, synthetic construct
  source 1..21: mol_type = other RNA; note = Description of Artificial Sequence: Synthetic oligonucleotide
  modified_base 1: mod_base = OTHER; note = 2'-O-methyluridine-3'-phosphorothioate
  modified_base 2: mod_base = OTHER; note = 2'-O-methylguanosine-3'- phosphorothioate
  modified_base 3: mod_base = OTHER; note = 2'-O-methyluridine-3'-phosphate
  modified_base 4: mod_base = OTHER; note = 2'-O-methyluridine-3'-phosphate
  modified_base 5: mod_base = OTHER; note = 2'-O-methyluridine-3'-phosphate
  modified_base 6: mod_base = OTHER; note = 2'-O-methylguanosine-3'-phosphate
  modified_base 7: mod_base = OTHER; note = 2'-fluorocytidine-3'-phosphate
  modified_base 8: mod_base = OTHER; note = 2'-O-methyluridine-3'-phosphate
  modified_base 9: mod_base = OTHER; note = 2'-fluoroguanosine-3'-phosphate
  modified_base 10: mod_base = OTHER; note = 2'-fluorouridine-3'-phosphate
  modified_base 11: mod_base = OTHER; note = 2'-fluoroguanosine-3'-phosphate
  modified_base 12: mod_base = OTHER; note = 2'-O-methyluridine-3'-phosphate
  modified_base 13: mod_base = OTHER; note = 2'-O-methyladenosine-3'-phosphate
  modified_base 14: mod_base = OTHER; note = 2'-O-methyluridine-3'-phosphate
  modified_base 15: mod_base = OTHER; note = 2'-O-methylguanosine-3'-phosphate
  modified_base 16: mod_base = OTHER; note = 2'-O-methyladenosine-3'-phosphate
  modified_base 17: mod_base = OTHER; note = 2'-O-methyluridine-3'-phosphate
  modified_base 18: mod_base = OTHER; note = 2'-O-methylcytidine-3'-phosphate
  modified_base 19: mod_base = OTHER; note = 2'-O-methyladenosine-3'-phosphate
  modified_base 20: mod_base = OTHER; note = 2'-O-methyladenosine-3'-phosphate
  modified_base 21: mod_base = OTHER; note = 2'-O-methyladenosine-3'-phosphate N-[tris(GalNAc-alkyl)-amidodecanoyl)]-4-hydroxyprolinol Hyp-(GalNAc-alkyl)3
tgtttgctgtgtatgatcaaa

SEQ ID NO: 1028 - RNA, 23 nt, synthetic construct
  source 1..23: mol_type = other RNA; note = Description of Artificial Sequence: Synthetic oligonucleotide
  modified_base 1: mod_base = OTHER; note = 2'-O-methyluridine-3'-phosphorothioate
  modified_base 2: mod_base = OTHER; note = 2'-fluorouridine -3'-phosphorothioate
  modified_base 3: mod_base = OTHER; note = 2'-O-methyluridine-3'-phosphate
  modified_base 4: mod_base = OTHER; note = 2'-O-methylguanosine-3'-phosphate
  modified_base 5: mod_base = OTHER; note = 2'-O-methyladenosine-3'-phosphate
  modified_base 6: mod_base = OTHER; note = 2'-fluorouridine-3'-phosphate
  modified_base 7: mod_base = OTHER; note = 2'-O-methylcytidine-3'-phosphate
  modified_base 8: mod_base = OTHER; note = 2'-fluoroadenosine-3'-phosphate
  modified_base 9: mod_base = OTHER; note = 2'-fluorouridine-3'-phosphate
  modified_base 10: mod_base = OTHER; note = 2'-O-methyladenosine-3'-phosphate
  modified_base 11: mod_base = OTHER; note = 2'-O-methylcytidine-3'-phosphate
  modified_base 12: mod_base = OTHER; note = 2'-O-methyladenosine-3'-phosphate
  modified_base 13: mod_base = OTHER; note = 2'-O-methylcytidine-3'-phosphate
  modified_base 14: mod_base = OTHER; note = 2'-fluoroadenosine-3'-phosphate
  modified_base 15: mod_base = OTHER; note = 2'-O-methylguanosine-3'-phosphate
  modified_base 16: mod_base = OTHER; note = 2'-fluorocytidine-3'-phosphate
  modified_base 17: mod_base = OTHER; note = 2'-O-methyladenosine-3'-phosphate
  modified_base 18: mod_base = OTHER; note = 2'-O-methyladenosine-3'-phosphate
  modified_base 19: mod_base = OTHER; note = 2'-O-methyladenosine-3'-phosphate
  modified_base 20: mod_base = OTHER; note = 2'-O-methylcytidine-3'-phosphate
  modified_base 21: mod_base = OTHER; note = 2'-O-methyladenosine-3'- phosphorothioate
  modified_base 22: mod_base = OTHER; note = 2'-O-methylguanosine-3'- phosphorothioate
  modified_base 23: mod_base = OTHER; note = 2'-O-methylguanosine-3'-phosphate
tttgatcatacacagcaaacagg

SEQ ID NO: 1029 - RNA, 21 nt, synthetic construct
  source 1..21: mol_type = other RNA; note = Description of Artificial Sequence: Synthetic oligonucleotide
  modified_base 1: mod_base = OTHER; note = 2'-O-methyluridine-3'-phosphorothioate
  modified_base 2: mod_base = OTHER; note = 2'-O-methyluridine-3'-phosphorothioate
  modified_base 3: mod_base = OTHER; note = 2'-O-methylcytidine-3'-phosphate
  modified_base 4: mod_base = OTHER; note = 2'-O-methylcytidine-3'-phosphate
  modified_base 5: mod_base = OTHER; note = 2'-O-methylguanosine-3'-phosphate
  modified_base 6: mod_base = OTHER; note = 2'-O-methyluridine-3'-phosphate
  modified_base 7: mod_base = OTHER; note = 2'-fluoroadenosine-3'-phosphate
  modified_base 8: mod_base = OTHER; note = 2'-O-methyluridine-3'-phosphate
  modified_base 9: mod_base = OTHER; note = 2'-fluoroadenosine-3'-phosphate
  modified_base 10: mod_base = OTHER; note = 2'-fluorouridine-3'-phosphate
  modified_base 11: mod_base = OTHER; note = 2'-fluoroadenosine-3'-phosphate
  modified_base 12: mod_base = OTHER; note = 2'-O-methyluridine-3'-phosphate
  modified_base 13: mod_base = OTHER; note = 2'-O-methylguanosine-3'-phosphate
  modified_base 14: mod_base = OTHER; note = 2'-O-methylguanosine-3'-phosphate
  modified_base 15: mod_base = OTHER; note = 2'-O-methylcytidine-3'-phosphate
  modified_base 16: mod_base = OTHER; note = 2'-O-methyladenosine-3'-phosphate
  modified_base 17: mod_base = OTHER; note = 2'-O-methyluridine-3'-phosphate
  modified_base 18: mod_base = OTHER; note = 2'-O-methylguanosine-3'-phosphate
  modified_base 19: mod_base = OTHER; note = 2'-O-methylcytidine-3'-phosphate
  modified_base 20: mod_base = OTHER; note = 2'-O-methyladenosine-3'-phosphate
  modified_base 21: mod_base = OTHER; note = 2'-O-methyladenosine-3'-phosphate N-[tris(GalNAc-alkyl)-amidodecanoyl)]-4-hydroxyprolinol Hyp-(GalNAc-alkyl)3
ttccgtatatatggcatgcaa

SEQ ID NO: 1030 - RNA, 23 nt, synthetic construct
  source 1..23: mol_type = other RNA; note = Description of Artificial Sequence: Synthetic oligonucleotide
  modified_base 1: mod_base = OTHER; note = 2'-O-methyluridine-3'-phosphorothioate
  modified_base 2: mod_base = OTHER; note = 2'-fluorouridine -3'-phosphorothioate
  modified_base 3: mod_base = OTHER; note = 2'-O-methylguanosine-3'-phosphate
  modified_base 4: mod_base = OTHER; note = 2'-O-methylcytidine-3'-phosphate
  modified_base 5: mod_base = OTHER; note = 2'-O-methyladenosine-3'-phosphate
  modified_base 6: mod_base = OTHER; note = 2'-fluorouridine-3'-phosphate
  modified_base 7: mod_base = OTHER; note = 2'-O-methylguanosine-3'-phosphate
  modified_base 8: mod_base = OTHER; note = 2'-fluorocytidine-3'-phosphate
  modified_base 9: mod_base = OTHER; note = 2'-fluorocytidine-3'-phosphate
  modified_base 10: mod_base = OTHER; note = 2'-O-methyladenosine-3'-phosphate
  modified_base 11: mod_base = OTHER; note = 2'-O-methyluridine-3'-phosphate
  modified_base 12: mod_base = OTHER; note = 2'-O-methyladenosine-3'-phosphate
  modified_base 13: mod_base = OTHER; note = 2'-O-methyluridine-3'-phosphate
  modified_base 14: mod_base = OTHER; note = 2'-fluoroadenosine-3'-phosphate
  modified_base 15: mod_base = OTHER; note = 2'-O-methyluridine-3'-phosphate
  modified_base 16: mod_base = OTHER; note = 2'-fluoroadenosine-3'-phosphate
  modified_base 17: mod_base = OTHER; note = 2'-O-methylcytidine-3'-phosphate
  modified_base 18: mod_base = OTHER; note = 2'-O-methylguanosine-3'-phosphate
  modified_base 19: mod_base = OTHER; note = 2'-O-methylguanosine-3'-phosphate
  modified_base 20: mod_base = OTHER; note = 2'-O-methyladenosine-3'-phosphate
  modified_base 21: mod_base = OTHER; note = 2'-O-methyladenosine-3'- phosphorothioate
  modified_base 22: mod_base = OTHER; note = 2'-O-methylguanosine-3'- phosphorothioate
  modified_base 23: mod_base = OTHER; note = 2'-O-methylcytidine-3'-phosphate
ttgcatgccatatatacggaagc

SEQ ID NO: 1031 - RNA, 21 nt, synthetic construct
  source 1..21: mol_type = other RNA; note = Description of Artificial Sequence: Synthetic oligonucleotide
  modified_base 1: mod_base = OTHER; note = 2'-O-methyladenosine-3'- phosphorothioate
  modified_base 2: mod_base = OTHER; note = 2'-O-methylcytidine-3'- phosphorothioate
  modified_base 3: mod_base = OTHER; note = 2'-O-methylcytidine-3'-phosphate
  modified_base 4: mod_base = OTHER; note = 2'-O-methyluridine-3'-phosphate
  modified_base 5: mod_base = OTHER; note = 2'-O-methylguanosine-3'-phosphate
  modified_base 6: mod_base = OTHER; note = 2'-O-methylcytidine-3'-phosphate
  modified_base 7: mod_base = OTHER; note = 2'-fluoroadenosine-3'-phosphate
  modified_base 8: mod_base = OTHER; note = 2'-O-methyladenosine-3'-phosphate
  modified_base 9: mod_base = OTHER; note = 2'-fluoroadenosine-3'-phosphate
  modified_base 10: mod_base = OTHER; note = 2'-fluoroadenosine-3'-phosphate
  modified_base 11: mod_base = OTHER; note = 2'-fluoroadenosine-3'-phosphate
  modified_base 12: mod_base = OTHER; note = 2'-O-methyluridine-3'-phosphate
  modified_base 13: mod_base = OTHER; note = 2'-O-methyluridine-3'-phosphate
  modified_base 14: mod_base = OTHER; note = 2'-O-methylguanosine-3'-phosphate
  modified_base 15: mod_base = OTHER; note = 2'-O-methyladenosine-3'-phosphate
  modified_base 16: mod_base = OTHER; note = 2'-O-methylguanosine-3'-phosphate
  modified_base 17: mod_base = OTHER; note = 2'-O-methylcytidine-3'-phosphate
  modified_base 18: mod_base = OTHER; note = 2'-O-methyladenosine-3'-phosphate
  modified_base 19: mod_base = OTHER; note = 2'-O-methyladenosine-3'-phosphate
  modified_base 20: mod_base = OTHER; note = 2'-O-methyluridine-3'-phosphate
  modified_base 21: mod_base = OTHER; note = 2'-O-methyladenosine-3'-phosphate N-[tris(GalNAc-alkyl)-amidodecanoyl)]-4-hydroxyprolinol Hyp-(GalNAc-alkyl)3
acctgcaaaaattgagcaata

SEQ ID NO: 1032 - RNA, 23 nt, synthetic construct
  source 1..23: mol_type = other RNA; note = Description of Artificial Sequence: Synthetic oligonucleotide
  modified_base 1: mod_base = OTHER; note = 2'-O-methyluridine-3'-phosphorothioate
  modified_base 2: mod_base = OTHER; note = 2'-fluoroadenosine-3'-phosphorothioate
  modified_base 3: mod_base = OTHER; note = 2'-O-methyluridine-3'-phosphate
  modified_base 4: mod_base = OTHER; note = 2'-O-methyluridine-3'-phosphate
  modified_base 5: mod_base = OTHER; note = 2'-O-methylguanosine-3'-phosphate
  modified_base 6: mod_base = OTHER; note = 2'-fluorocytidine-3'-phosphate
  modified_base 7: mod_base = OTHER; note = 2'-O-methyluridine-3'-phosphate
  modified_base 8: mod_base = OTHER; note = 2'-fluorocytidine-3'-phosphate
  modified_base 9: mod_base = OTHER; note = 2'-fluoroadenosine-3'-phosphate
  modified_base 10: mod_base = OTHER; note = 2'-O-methyladenosine-3'-phosphate
  modified_base 11: mod_base = OTHER; note = 2'-O-methyluridine-3'-phosphate
  modified_base 12: mod_base = OTHER; note = 2'-O-methyluridine-3'-phosphate
  modified_base 13: mod_base = OTHER; note = 2'-O-methyluridine-3'-phosphate
  modified_base 14: mod_base = OTHER; note = 2'-fluorouridine-3'-phosphate
  modified_base 15: mod_base = OTHER; note = 2'-O-methyluridine-3'-phosphate
  modified_base 16: mod_base = OTHER; note = 2'-fluoroguanosine-3'-phosphate
  modified_base 17: mod_base = OTHER; note = 2'-O-methylcytidine-3'-phosphate
  modified_base 18: mod_base = OTHER; note = 2'-O-methyladenosine-3'-phosphate
  modified_base 19: mod_base = OTHER; note = 2'-O-methylguanosine-3'-phosphate
  modified_base 20: mod_base = OTHER; note = 2'-O-methylguanosine-3'-phosphate
  modified_base 21: mod_base = OTHER; note = 2'-O-methyluridine-3'-phosphorothioate
  modified_base 22: mod_base = OTHER; note = 2'-O-methyluridine-3'-phosphorothioate
  modified_base 23: mod_base = OTHER; note = 2'-O-methylcytidine-3'-phosphate
tattgctcaatttttgcaggttc

SEQ ID NO: 1033 - RNA, 21 nt, synthetic construct
  source 1..21: mol_type = other RNA; note = Description of Artificial Sequence: Synthetic oligonucleotide
  modified_base 1: mod_base = OTHER; note = 2'-O-methyladenosine-3'- phosphorothioate
  modified_base 2: mod_base = OTHER; note = 2'-O-methylcytidine-3'- phosphorothioate
  modified_base 3: mod_base = OTHER; note = 2'-O-methylcytidine-3'-phosphate
  modified_base 4: mod_base = OTHER; note = 2'-O-methyluridine-3'-phosphate
  modified_base 5: mod_base = OTHER; note = 2'-O-methylguanosine-3'-phosphate
  modified_base 6: mod_base = OTHER; note = 2'-O-methylcytidine-3'-phosphate
  modified_base 7: mod_base = OTHER; note = 2'-fluoroadenosine-3'-phosphate
  modified_base 8: mod_base = OTHER; note = 2'-O-methyladenosine-3'-phosphate
  modified_base 9: mod_base = OTHER; note = 2'-fluoroadenosine-3'-phosphate
  modified_base 10: mod_base = OTHER; note = 2'-fluoroadenosine-3'-phosphate
  modified_base 11: mod_base = OTHER; note = 2'-fluoroadenosine-3'-phosphate
  modified_base 12: mod_base = OTHER; note = 2'-O-methyluridine-3'-phosphate
  modified_base 13: mod_base = OTHER; note = 2'-O-methyluridine-3'-phosphate
  modified_base 14: mod_base = OTHER; note = 2'-O-methylguanosine-3'-phosphate
  modified_base 15: mod_base = OTHER; note = 2'-O-methyladenosine-3'-phosphate
  modified_base 16: mod_base = OTHER; note = 2'-O-methylguanosine-3'-phosphate
  modified_base 17: mod_base = OTHER; note = 2'-O-methylcytidine-3'-phosphate
  modified_base 18: mod_base = OTHER; note = 2'-O-methyladenosine-3'-phosphate
  modified_base 19: mod_base = OTHER; note = 2'-O-methyladenosine-3'-phosphate
  modified_base 20: mod_base = OTHER; note = 2'-O-methyluridine-3'-phosphate
  modified_base 21: mod_base = OTHER; note = 2'-O-methyladenosine-3'-phosphate N-[tris(GalNAc-alkyl)-amidodecanoyl)]-4-hydroxyprolinol Hyp-(GalNAc-alkyl)3
acctgcaaaaattgagcaata

SEQ ID NO: 1034 - RNA, 23 nt, synthetic construct
  source 1..23: mol_type = other RNA; note = Description of Artificial Sequence: Synthetic oligonucleotide
  modified_base 1: mod_base = OTHER; note = 2'-O-methyluridine-3'-phosphorothioate
  modified_base 2: mod_base = OTHER; note = 2'-fluoroadenosine-3'-phosphorothioate
  modified_base 3: mod_base = OTHER; note = 2'-O-methyluridine-3'-phosphate
  modified_base 4: mod_base = OTHER; note = 2'-O-methyluridine-3'-phosphate
  modified_base 5: mod_base = OTHER; note = 2'-O-methylguanosine-3'-phosphate
  modified_base 6: mod_base = OTHER; note = 2'-fluorocytidine-3'-phosphate
  modified_base 7: mod_base = OTHER; note = 2'-O-methyluridine-3'-phosphate
  modified_base 8: mod_base = OTHER; note = 2'-O-methylcytidine-3'-phosphate
  modified_base 9: mod_base = OTHER; note = 2'-O-methyladenosine-3'-phosphate
  modified_base 10: mod_base = OTHER; note = 2'-O-methyladenosine-3'-phosphate
  modified_base 11: mod_base = OTHER; note = 2'-O-methyluridine-3'-phosphate
  modified_base 12: mod_base = OTHER; note = 2'-O-methyluridine-3'-phosphate
  modified_base 13: mod_base = OTHER; note = 2'-O-methyluridine-3'-phosphate
  modified_base 14: mod_base = OTHER; note = 2'-fluorouridine-3'-phosphate
  modified_base 15: mod_base = OTHER; note = 2'-O-methyluridine-3'-phosphate
  modified_base 16: mod_base = OTHER; note = 2'-fluoroguanosine-3'-phosphate
  modified_base 17: mod_base = OTHER; note = 2'-O-methylcytidine-3'-phosphate
  modified_base 18: mod_base = OTHER; note = 2'-O-methyladenosine-3'-phosphate
  modified_base 19: mod_base = OTHER; note = 2'-O-methylguanosine-3'-phosphate
  modified_base 20: mod_base = OTHER; note = 2'-O-methylguanosine-3'-phosphate
  modified_base 21: mod_base = OTHER; note = 2'-O-methyluridine-3'-phosphorothioate
  modified_base 22: mod_base = OTHER; note = 2'-O-methyluridine-3'-phosphorothioate
  modified_base 23: mod_base = OTHER; note = 2'-O-methylcytidine-3'-phosphate
tattgctcaatttttgcaggttc

SEQ ID NO: 1035 - RNA, 21 nt, synthetic construct
  source 1..21: mol_type = other RNA; note = Description of Artificial Sequence: Synthetic oligonucleotide
  modified_base 1: mod_base = OTHER; note = 2'-O-methyluridine-3'-phosphorothioate
  modified_base 2: mod_base = OTHER; note = 2'-O-methylguanosine-3'- phosphorothioate
  modified_base 3: mod_base = OTHER; note = 2'-O-methyluridine-3'-phosphate
  modified_base 4: mod_base = OTHER; note = 2'-O-methyluridine-3'-phosphate
  modified_base 5: mod_base = OTHER; note = 2'-O-methyluridine-3'-phosphate
  modified_base 6: mod_base = OTHER; note = 2'-O-methylguanosine-3'-phosphate
  modified_base 7: mod_base = OTHER; note = 2'-fluorocytidine-3'-phosphate
  modified_base 8: mod_base = OTHER; note = 2'-O-methyluridine-3'-phosphate
  modified_base 9: mod_base = OTHER; note = 2'-fluoroguanosine-3'-phosphate
  modified_base 10: mod_base = OTHER; note = 2'-fluorouridine-3'-phosphate
  modified_base 11: mod_base = OTHER; note = 2'-fluoroguanosine-3'-phosphate
  modified_base 12: mod_base = OTHER; note = 2'-O-methyluridine-3'-phosphate
  modified_base 13: mod_base = OTHER; note = 2'-O-methyladenosine-3'-phosphate
  modified_base 14: mod_base = OTHER; note = 2'-O-methyluridine-3'-phosphate
  modified_base 15: mod_base = OTHER; note = 2'-O-methylguanosine-3'-phosphate
  modified_base 16: mod_base = OTHER; note = 2'-O-methyladenosine-3'-phosphate
  modified_base 17: mod_base = OTHER; note = 2'-O-methyluridine-3'-phosphate
  modified_base 18: mod_base = OTHER; note = 2'-O-methylcytidine-3'-phosphate
  modified_base 19: mod_base = OTHER; note = 2'-O-methyladenosine-3'-phosphate
  modified_base 20: mod_base = OTHER; note = 2'-O-methyladenosine-3'-phosphate
  modified_base 21: mod_base = OTHER; note = 2'-O-methyladenosine-3'-phosphate N-[tris(GalNAc-alkyl)-amidodecanoyl)]-4-hydroxyprolinol Hyp-(GalNAc-alkyl)3
tgtttgctgtgtatgatcaaa

SEQ ID NO: 1036 - RNA, 23 nt, synthetic construct
  source 1..23: mol_type = other RNA; note = Description of Artificial Sequence: Synthetic oligonucleotide
  modified_base 1: mod_base = OTHER; note = 2'-O-methyluridine-3'-phosphorothioate
  modified_base 2: mod_base = OTHER; note = 2'-fluorouridine -3'-phosphorothioate
  modified_base 3: mod_base = OTHER; note = 2'-O-methyluridine-3'-phosphate
  modified_base 4: mod_base = OTHER; note = 2'-O-methylguanosine-3'-phosphate
  modified_base 5: mod_base = OTHER; note = 2'-O-methyladenosine-3'-phosphate
  modified_base 6: mod_base = OTHER; note = 2'-fluorouridine-3'-phosphate
  modified_base 7: mod_base = OTHER; note = 2'-O-methylcytidine-3'-phosphate
  modified_base 8: mod_base = OTHER; note = 2'-fluoroadenosine-3'-phosphate
  modified_base 9: mod_base = OTHER; note = 2'-fluorouridine-3'-phosphate
  modified_base 10: mod_base = OTHER; note = 2'-O-methyladenosine-3'-phosphate
  modified_base 11: mod_base = OTHER; note = 2'-O-methylcytidine-3'-phosphate
  modified_base 12: mod_base = OTHER; note = 2'-O-methyladenosine-3'-phosphate
  modified_base 13: mod_base = OTHER; note = 2'-O-methylcytidine-3'-phosphate
  modified_base 14: mod_base = OTHER; note = 2'-fluoroadenosine-3'-phosphate
  modified_base 15: mod_base = OTHER; note = 2'-O-methylguanosine-3'-phosphate
  modified_base 16: mod_base = OTHER; note = 2'-fluorocytidine-3'-phosphate
  modified_base 17: mod_base = OTHER; note = 2'-O-methyladenosine-3'-phosphate
  modified_base 18: mod_base = OTHER; note = 2'-O-methyladenosine-3'-phosphate
  modified_base 19: mod_base = OTHER; note = 2'-O-methyladenosine-3'-phosphate
  modified_base 20: mod_base = OTHER; note = 2'-O-methylcytidine-3'-phosphate
  modified_base 21: mod_base = OTHER; note = 2'-O-methyladenosine-3'- phosphorothioate
  modified_base 22: mod_base = OTHER; note = 2'-O-methylguanosine-3'- phosphorothioate
  modified_base 23: mod_base = OTHER; note = 2'-O-methylguanosine-3'-phosphate
tttgatcatacacagcaaacagg

SEQ ID NO: 1037 - RNA, 21 nt, synthetic construct
  source 1..21: mol_type = other RNA; note = Description of Artificial Sequence: Synthetic oligonucleotide
  modified_base 1: mod_base = OTHER; note = 2'-O-methyluridine-3'-phosphorothioate
  modified_base 2: mod_base = OTHER; note = 2'-O-methylcytidine-3'- phosphorothioate
  modified_base 3: mod_base = OTHER; note = 2'-O-methyluridine-3'-phosphate
  modified_base 4: mod_base = OTHER; note = 2'-O-methylcytidine-3'-phosphate
  modified_base 5: mod_base = OTHER; note = 2'-O-methylcytidine-3'-phosphate
  modified_base 6: mod_base = OTHER; note = 2'-O-methylcytidine-3'-phosphate
  modified_base 7: mod_base = OTHER; note = 2'-fluoroadenosine-3'-phosphate
  modified_base 8: mod_base = OTHER; note = 2'-O-methylcytidine-3'-phosphate
  modified_base 9: mod_base = OTHER; note = 2'-fluorocytidine-3'-phosphate
  modified_base 10: mod_base = OTHER; note = 2'-fluorouridine-3'-phosphate
  modified_base 11: mod_base = OTHER; note = 2'-fluorouridine-3'-phosphate
  modified_base 12: mod_base = OTHER; note = 2'-O-methyluridine-3'-phosphate
  modified_base 13: mod_base = OTHER; note = 2'-O-methyluridine-3'-phosphate
  modified_base 14: mod_base = OTHER; note = 2'-O-methylcytidine-3'-phosphate
  modified_base 15: mod_base = OTHER; note = 2'-O-methyluridine-3'-phosphate
  modified_base 16: mod_base = OTHER; note = 2'-O-methyluridine-3'-phosphate
  modified_base 17: mod_base = OTHER; note = 2'-O-methylcytidine-3'-phosphate
  modified_base 18: mod_base = OTHER; note = 2'-O-methyluridine-3'-phosphate
  modified_base 19: mod_base = OTHER; note = 2'-O-methyladenosine-3'-phosphate
  modified_base 20: mod_base = OTHER; note = 2'-O-methyladenosine-3'-phosphate
  modified_base 21: mod_base = OTHER; note = 2'-O-methyluridine-3'-phosphate
tctcccaccttttcttctaat

SEQ ID NO: 1038 - RNA, 23 nt, synthetic construct
  source 1..23: mol_type = other RNA; note = Description of Artificial Sequence: Synthetic oligonucleotide
  modified_base 1: mod_base = OTHER; note = 2'-O-methyladenosine-3'- phosphorothioate
  modified_base 2: mod_base = OTHER; note = 2'-fluorouridine -3'-phosphorothioate
  modified_base 3: mod_base = OTHER; note = 2'-O-methyluridine-3'-phosphate
  modified_base 4: mod_base = OTHER; note = 2'-O-methyladenosine-3'-phosphate
  modified_base 5: mod_base = OTHER; note = 2'-O-methylguanosine-3'-phosphate
  modified_base 6: mod_base = OTHER; note = 2'-fluoroadenosine-3'-phosphate
  modified_base 7: mod_base = OTHER; note = 2'-O-methyladenosine-3'-phosphate
  modified_base 8: mod_base = OTHER; note = 2'-O-methylguanosine-3'-phosphate
  modified_base 9: mod_base = OTHER; note = 2'-O-methyladenosine-3'-phosphate
  modified_base 10: mod_base = OTHER; note = 2'-O-methyladenosine-3'-phosphate
  modified_base 11: mod_base = OTHER; note = 2'-O-methyladenosine-3'-phosphate
  modified_base 12: mod_base = OTHER; note = 2'-O-methyladenosine-3'-phosphate
  modified_base 13: mod_base = OTHER; note = 2'-O-methylguanosine-3'-phosphate
  modified_base 14: mod_base = OTHER; note = 2'-fluoroguanosine-3'-phosphate
  modified_base 15: mod_base = OTHER; note = 2'-O-methyluridine-3'-phosphate
  modified_base 16: mod_base = OTHER; note = 2'-fluoroguanosine-3'-phosphate
  modified_base 17: mod_base = OTHER; note = 2'-O-methylguanosine-3'-phosphate
  modified_base 18: mod_base = OTHER; note = 2'-O-methylguanosine-3'-phosphate
  modified_base 19: mod_base = OTHER; note = 2'-O-methyladenosine-3'-phosphate
  modified_base 20: mod_base = OTHER; note = 2'-O-methylguanosine-3'-phosphate
  modified_base 21: mod_base = OTHER; note = 2'-O-methyladenosine-3'- phosphorothioate
  modified_base 22: mod_base = OTHER; note = 2'-O-methylcytidine-3'- phosphorothioate
  modified_base 23: mod_base = OTHER; note = 2'-O-methyluridine-3'-phosphate
attagaagaaaaggtgggagact

SEQ ID NO: 1039 - RNA, 21 nt, synthetic construct
  source 1..21: mol_type = other RNA; note = Description of Artificial Sequence: Synthetic oligonucleotide
  modified_base 1: mod_base = OTHER; note = 2'-O-methylcytidine-3'- phosphorothioate
  modified_base 2: mod_base = OTHER; note = 2'-O-methylcytidine-3'- phosphorothioate
  modified_base 3: mod_base = OTHER; note = 2'-O-methylcytidine-3'-phosphate
  modified_base 4: mod_base = OTHER; note = 2'-O-methyladenosine-3'-phosphate
  modified_base 5: mod_base = OTHER; note = 2'-O-methylcytidine-3'-phosphate
  modified_base 6: mod_base = OTHER; note = 2'-O-methylcytidine-3'-phosphate
  modified_base 7: mod_base = OTHER; note = 2'-fluorouridine-3'-phosphate
  modified_base 8: mod_base = OTHER; note = 2'-O-methyluridine-3'-phosphate
  modified_base 9: mod_base = OTHER; note = 2'-fluorouridine-3'-phosphate
  modified_base 10: mod_base = OTHER; note = 2'-fluorouridine-3'-phosphate
  modified_base 11: mod_base = OTHER; note = 2'-fluorocytidine-3'-phosphate
  modified_base 12: mod_base = OTHER; note = 2'-O-methyluridine-3'-phosphate
  modified_base 13: mod_base = OTHER; note = 2'-O-methyluridine-3'-phosphate
  modified_base 14: mod_base = OTHER; note = 2'-O-methylcytidine-3'-phosphate
  modified_base 15: mod_base = OTHER; note = 2'-O-methyluridine-3'-phosphate
  modified_base 16: mod_base = OTHER; note = 2'-O-methyladenosine-3'-phosphate
  modified_base 17: mod_base = OTHER; note = 2'-O-methyladenosine-3'-phosphate
  modified_base 18: mod_base = OTHER; note = 2'-O-methyluridine-3'-phosphate
  modified_base 19: mod_base = OTHER; note = 2'-O-methylguanosine-3'-phosphate
  modified_base 20: mod_base = OTHER; note = 2'-O-methyladenosine-3'-phosphate
  modified_base 21: mod_base = OTHER; note = 2'-O-methyladenosine-3'-phosphate N-[tris(GalNAc-alkyl)-amidodecanoyl)]-4-hydroxyprolinol Hyp-(GalNAc-alkyl)3
cccaccttttcttctaatgaa

SEQ ID NO: 1040 - RNA, 23 nt, synthetic construct
  source 1..23: mol_type = other RNA; note = Description of Artificial Sequence: Synthetic oligonucleotide
  modified_base 1: mod_base = OTHER; note = 2'-O-methyluridine-3'-phosphorothioate
  modified_base 2: mod_base = OTHER; note = 2'-fluorouridine -3'-phosphorothioate
  modified_base 3: mod_base = OTHER; note = 2'-O-methylcytidine-3'-phosphate
  modified_base 4: mod_base = OTHER; note = 2'-O-methyladenosine-3'-phosphate
  modified_base 5: mod_base = OTHER; note = 2'-O-methyluridine-3'-phosphate
  modified_base 6: mod_base = OTHER; note = 2'-fluorouridine-3'-phosphate
  modified_base 7: mod_base = OTHER; note = 2'-O-methyladenosine-3'-phosphate
  modified_base 8: mod_base = OTHER; note = 2'-fluoroguanosine-3'-phosphate
  modified_base 9: mod_base = OTHER; note = 2'-fluoroadenosine-3'-phosphate
  modified_base 10: mod_base = OTHER; note = 2'-O-methyladenosine-3'-phosphate
  modified_base 11: mod_base = OTHER; note = 2'-O-methylguanosine-3'-phosphate
  modified_base 12: mod_base = OTHER; note = 2'-O-methyladenosine-3'-phosphate
  modified_base 13: mod_base = OTHER; note = 2'-O-methyladenosine-3'-phosphate
  modified_base 14: mod_base = OTHER; note = 2'-fluoroadenosine-3'-phosphate
  modified_base 15: mod_base = OTHER; note = 2'-O-methyladenosine-3'-phosphate
  modified_base 16: mod_base = OTHER; note = 2'-fluoroguanosine-3'-phosphate
  modified_base 17: mod_base = OTHER; note = 2'-O-methylguanosine-3'-phosphate
  modified_base 18: mod_base = OTHER; note = 2'-O-methyluridine-3'-phosphate
  modified_base 19: mod_base = OTHER; note = 2'-O-methylguanosine-3'-phosphate
  modified_base 20: mod_base = OTHER; note = 2'-O-methylguanosine-3'-phosphate
  modified_base 21: mod_base = OTHER; note = 2'-O-methylguanosine-3'- phosphorothioate
  modified_base 22: mod_base = OTHER; note = 2'-O-methyladenosine-3'- phosphorothioate
  modified_base 23: mod_base = OTHER; note = 2'-O-methylguanosine-3'-phosphate
ttcattagaagaaaaggtgggag

SEQ ID NO: 1041 - RNA, 21 nt, synthetic construct
  source 1..21: mol_type = other RNA; note = Description of Artificial Sequence: Synthetic oligonucleotide
  modified_base 1: mod_base = OTHER; note = 2'-O-methylcytidine-3'- phosphorothioate
  modified_base 2: mod_base = OTHER; note = 2'-O-methylcytidine-3'- phosphorothioate
  modified_base 3: mod_base = OTHER; note = 2'-O-methylcytidine-3'-phosphate
  modified_base 4: mod_base = OTHER; note = 2'-O-methyladenosine-3'-phosphate
  modified_base 5: mod_base = OTHER; note = 2'-O-methylcytidine-3'-phosphate
  modified_base 6: mod_base = OTHER; note = 2'-O-methylcytidine-3'-phosphate
  modified_base 7: mod_base = OTHER; note = 2'-fluorouridine-3'-phosphate
  modified_base 8: mod_base = OTHER; note = 2'-O-methyluridine-3'-phosphate
  modified_base 9: mod_base = OTHER; note = 2'-fluorouridine-3'-phosphate
  modified_base 10: mod_base = OTHER; note = 2'-fluorouridine-3'-phosphate
  modified_base 11: mod_base = OTHER; note = 2'-fluorocytidine-3'-phosphate
  modified_base 12: mod_base = OTHER; note = 2'-O-methyluridine-3'-phosphate
  modified_base 13: mod_base = OTHER; note = 2'-O-methyluridine-3'-phosphate
  modified_base 14: mod_base = OTHER; note = 2'-O-methylcytidine-3'-phosphate
  modified_base 15: mod_base = OTHER; note = 2'-O-methyluridine-3'-phosphate
  modified_base 16: mod_base = OTHER; note = 2'-O-methyladenosine-3'-phosphate
  modified_base 17: mod_base = OTHER; note = 2'-O-methyladenosine-3'-phosphate
  modified_base 18: mod_base = OTHER; note = 2'-O-methyluridine-3'-phosphate
  modified_base 19: mod_base = OTHER; note = 2'-O-methylguanosine-3'-phosphate
  modified_base 20: mod_base = OTHER; note = 2'-O-methyladenosine-3'-phosphate
  modified_base 21: mod_base = OTHER; note = 2'-O-methyladenosine-3'-phosphate N-[tris(GalNAc-alkyl)-amidodecanoyl)]-4-hydroxyprolinol Hyp-(GalNAc-alkyl)3
cccaccttttcttctaatgaa

SEQ ID NO: 1042 - RNA, 23 nt, synthetic construct
  source 1..23: mol_type = other RNA; note = Description of Artificial Sequence: Synthetic oligonucleotide
  modified_base 1: mod_base = OTHER; note = 2'-O-methyluridine-3'-phosphorothioate
  modified_base 2: mod_base = OTHER; note = 2'-fluorouridine -3'-phosphorothioate
  modified_base 3: mod_base = OTHER; note = 2'-O-methylcytidine-3'-phosphate
  modified_base 4: mod_base = OTHER; note = 2'-O-methyladenosine-3'-phosphate
  modified_base 5: mod_base = OTHER; note = 2'-O-methyluridine-3'-phosphate
  modified_base 6: mod_base = OTHER; note = 2'-fluorouridine-3'-phosphate
  modified_base 7: mod_base = OTHER; note = 2'-O-methyladenosine-3'-phosphate
  modified_base 8: mod_base = OTHER; note = 2'-O-methylguanosine-3'-phosphate
  modified_base 9: mod_base = OTHER; note = 2'-O-methyladenosine-3'-phosphate
  modified_base 10: mod_base = OTHER; note = 2'-O-methyladenosine-3'-phosphate
  modified_base 11: mod_base = OTHER; note = 2'-O-methylguanosine-3'-phosphate
  modified_base 12: mod_base = OTHER; note = 2'-O-methyladenosine-3'-phosphate
  modified_base 13: mod_base = OTHER; note = 2'-O-methyladenosine-3'-phosphate
  modified_base 14: mod_base = OTHER; note = 2'-fluoroadenosine-3'-phosphate
  modified_base 15: mod_base = OTHER; note = 2'-O-methyladenosine-3'-phosphate
  modified_base 16: mod_base = OTHER; note = 2'-fluoroguanosine-3'-phosphate
  modified_base 17: mod_base = OTHER; note = 2'-O-methylguanosine-3'-phosphate
  modified_base 18: mod_base = OTHER; note = 2'-O-methyluridine-3'-phosphate
  modified_base 19: mod_base = OTHER; note = 2'-O-methylguanosine-3'-phosphate
  modified_base 20: mod_base = OTHER; note = 2'-O-methylguanosine-3'-phosphate
  modified_base 21: mod_base = OTHER; note = 2'-O-methylguanosine-3'- phosphorothioate
  modified_base 22: mod_base = OTHER; note = 2'-O-methyladenosine-3'- phosphorothioate
  modified_base 23: mod_base = OTHER; note = 2'-O-methylguanosine-3'-phosphate
ttcattagaagaaaaggtgggag

SEQ ID NO: 1043 - RNA, 21 nt, synthetic construct
  source 1..21: mol_type = other RNA; note = Description of Artificial Sequence: Synthetic oligonucleotide
  modified_base 1: mod_base = OTHER; note = 2'-O-methylcytidine-3'- phosphorothioate
  modified_base 2: mod_base = OTHER; note = 2'-O-methylcytidine-3'- phosphorothioate
  modified_base 3: mod_base = OTHER; note = 2'-O-methyladenosine-3'-phosphate
  modified_base 4: mod_base = OTHER; note = 2'-O-methylguanosine-3'-phosphate
  modified_base 5: mod_base = OTHER; note = 2'-O-methylcytidine-3'-phosphate
  modified_base 6: mod_base = OTHER; note = 2'-O-methyluridine-3'-phosphate
  modified_base 7: mod_base = OTHER; note = 2'-fluorouridine-3'-phosphate
  modified_base 8: mod_base = OTHER; note = 2'-O-methylguanosine-3'-phosphate
  modified_base 9: mod_base = OTHER; note = 2'-fluorouridine-3'-phosphate
  modified_base 10: mod_base = OTHER; note = 2'-fluorouridine-3'-phosphate
  modified_base 11: mod_base = OTHER; note = 2'-fluorouridine-3'-phosphate
  modified_base 12: mod_base = OTHER; note = 2'-O-methylguanosine-3'-phosphate
  modified_base 13: mod_base = OTHER; note = 2'-O-methyluridine-3'-phosphate
  modified_base 14: mod_base = OTHER; note = 2'-O-methylguanosine-3'-phosphate
  modified_base 15: mod_base = OTHER; note = 2'-O-methyladenosine-3'-phosphate
  modified_base 16: mod_base = OTHER; note = 2'-O-methyladenosine-3'-phosphate
  modified_base 17: mod_base = OTHER; note = 2'-O-methyladenosine-3'-phosphate
  modified_base 18: mod_base = OTHER; note = 2'-O-methylcytidine-3'-phosphate
  modified_base 19: mod_base = OTHER; note = 2'-O-methyladenosine-3'-phosphate
  modified_base 20: mod_base = OTHER; note = 2'-O-methyladenosine-3'-phosphate
  modified_base 21: mod_base = OTHER; note = 2'-O-methyladenosine-3'-phosphate N-[tris(GalNAc-alkyl)-amidodecanoyl)]-4-hydroxyprolinol Hyp-(GalNAc-alkyl)3
ccagcttgtttgtgaaacaaa

SEQ ID NO: 1044 - RNA, 23 nt, synthetic construct
  source 1..23: mol_type = other RNA; note = Description of Artificial Sequence: Synthetic oligonucleotide
  modified_base 1: mod_base = OTHER; note = 2'-O-methyluridine-3'-phosphorothioate
  modified_base 2: mod_base = OTHER; note = 2'-fluorouridine -3'-phosphorothioate
  modified_base 3: mod_base = OTHER; note = 2'-O-methyluridine-3'-phosphate
  modified_base 4: mod_base = OTHER; note = 2'-O-methylguanosine-3'-phosphate
  modified_base 5: mod_base = OTHER; note = 2'-O-methyluridine-3'-phosphate
  modified_base 6: mod_base = OTHER; note = 2'-fluorouridine-3'-phosphate
  modified_base 7: mod_base = OTHER; note = 2'-O-methyluridine-3'-phosphate
  modified_base 8: mod_base = OTHER; note = 2'-fluorocytidine-3'-phosphate
  modified_base 9: mod_base = OTHER; note = 2'-fluoroadenosine-3'-phosphate
  modified_base 10: mod_base = OTHER; note = 2'-O-methylcytidine-3'-phosphate
  modified_base 11: mod_base = OTHER; note = 2'-O-methyladenosine-3'-phosphate
  modified_base 12: mod_base = OTHER; note = 2'-O-methyladenosine-3'-phosphate
  modified_base 13: mod_base = OTHER; note = 2'-O-methyladenosine-3'-phosphate
  modified_base 14: mod_base = OTHER; note = 2'-fluorocytidine-3'-phosphate
  modified_base 15: mod_base = OTHER; note = 2'-O-methyladenosine-3'-phosphate
  modified_base 16: mod_base = OTHER; note = 2'-fluoroadenosine-3'-phosphate
  modified_base 17: mod_base = OTHER; note = 2'-O-methylguanosine-3'-phosphate
  modified_base 18: mod_base = OTHER; note = 2'-O-methylcytidine-3'-phosphate
  modified_base 19: mod_base = OTHER; note = 2'-O-methyluridine-3'-phosphate
  modified_base 20: mod_base = OTHER; note = 2'-O-methylguanosine-3'-phosphate
  modified_base 21: mod_base = OTHER; note = 2'-O-methylguanosine-3'- phosphorothioate
  modified_base 22: mod_base = OTHER; note = 2'-O-methyluridine-3'-phosphorothioate
  modified_base 23: mod_base = OTHER; note = 2'-O-methylcytidine-3'-phosphate
tttgtttcacaaacaagctggtc

SEQ ID NO: 1045 - RNA, 21 nt, synthetic construct
  source 1..21: mol_type = other RNA; note = Description of Artificial Sequence: Synthetic oligonucleotide
  modified_base 1: mod_base = OTHER; note = 2'-O-methylcytidine-3'- phosphorothioate
  modified_base 2: mod_base = OTHER; note = 2'-O-methylcytidine-3'- phosphorothioate
  modified_base 3: mod_base = OTHER; note = 2'-O-methyladenosine-3'-phosphate
  modified_base 4: mod_base = OTHER; note = 2'-O-methylguanosine-3'-phosphate
  modified_base 5: mod_base = OTHER; note = 2'-O-methylcytidine-3'-phosphate
  modified_base 6: mod_base = OTHER; note = 2'-O-methyluridine-3'-phosphate
  modified_base 7: mod_base = OTHER; note = 2'-fluorouridine-3'-phosphate
  modified_base 8: mod_base = OTHER; note = 2'-O-methylguanosine-3'-phosphate
  modified_base 9: mod_base = OTHER; note = 2'-fluorouridine-3'-phosphate
  modified_base 10: mod_base = OTHER; note = 2'-fluorouridine-3'-phosphate
  modified_base 11: mod_base = OTHER; note = 2'-fluorouridine-3'-phosphate
  modified_base 12: mod_base = OTHER; note = 2'-O-methylguanosine-3'-phosphate
  modified_base 13: mod_base = OTHER; note = 2'-O-methyluridine-3'-phosphate
  modified_base 14: mod_base = OTHER; note = 2'-O-methylguanosine-3'-phosphate
  modified_base 15: mod_base = OTHER; note = 2'-O-methyladenosine-3'-phosphate
  modified_base 16: mod_base = OTHER; note = 2'-O-methyladenosine-3'-phosphate
  modified_base 17: mod_base = OTHER; note = 2'-O-methyladenosine-3'-phosphate
  modified_base 18: mod_base = OTHER; note = 2'-O-methylcytidine-3'-phosphate
  modified_base 19: mod_base = OTHER; note = 2'-O-methyladenosine-3'-phosphate
  modified_base 20: mod_base = OTHER; note = 2'-O-methyladenosine-3'-phosphate
  modified_base 21: mod_base = OTHER; note = 2'-O-methyladenosine-3'-phosphate N-[tris(GalNAc-alkyl)-amidodecanoyl)]-4-hydroxyprolinol Hyp-(GalNAc-alkyl)3
ccagcttgtttgtgaaacaaa

SEQ ID NO: 1046 - RNA, 23 nt, synthetic construct
  source 1..23: mol_type = other RNA; note = Description of Artificial Sequence: Synthetic oligonucleotide
  modified_base 1: mod_base = OTHER; note = 2'-O-methyluridine-3'-phosphorothioate
  modified_base 2: mod_base = OTHER; note = 2'-fluorouridine -3'-phosphorothioate
  modified_base 3: mod_base = OTHER; note = 2'-O-methyluridine-3'-phosphate
  modified_base 4: mod_base = OTHER; note = 2'-O-methylguanosine-3'-phosphate
  modified_base 5: mod_base = OTHER; note = 2'-O-methyluridine-3'-phosphate
  modified_base 6: mod_base = OTHER; note = 2'-fluorouridine-3'-phosphate
  modified_base 7: mod_base = OTHER; note = 2'-O-methyluridine-3'-phosphate
  modified_base 8: mod_base = OTHER; note = 2'-O-methylcytidine-3'-phosphate
  modified_base 9: mod_base = OTHER; note = 2'-O-methyladenosine-3'-phosphate
  modified_base 10: mod_base = OTHER; note = 2'-O-methylcytidine-3'-phosphate
  modified_base 11: mod_base = OTHER; note = 2'-O-methyladenosine-3'-phosphate
  modified_base 12: mod_base = OTHER; note = 2'-O-methyladenosine-3'-phosphate
  modified_base 13: mod_base = OTHER; note = 2'-O-methyladenosine-3'-phosphate
  modified_base 14: mod_base = OTHER; note = 2'-fluorocytidine-3'-phosphate
  modified_base 15: mod_base = OTHER; note = 2'-O-methyladenosine-3'-phosphate
  modified_base 16: mod_base = OTHER; note = 2'-fluoroadenosine-3'-phosphate
  modified_base 17: mod_base = OTHER; note = 2'-O-methylguanosine-3'-phosphate
  modified_base 18: mod_base = OTHER; note = 2'-O-methylcytidine-3'-phosphate
  modified_base 19: mod_base = OTHER; note = 2'-O-methyluridine-3'-phosphate
  modified_base 20: mod_base = OTHER; note = 2'-O-methylguanosine-3'-phosphate
  modified_base 21: mod_base = OTHER; note = 2'-O-methylguanosine-3'- phosphorothioate
  modified_base 22: mod_base = OTHER; note = 2'-O-methyluridine-3'-phosphorothioate
  modified_base 23: mod_base = OTHER; note = 2'-O-methylcytidine-3'-phosphate
tttgtttcacaaacaagctggtc

SEQ ID NO: 1047 - RNA, 21 nt, synthetic construct
  source 1..21: mol_type = other RNA; note = Description of Artificial Sequence: Synthetic oligonucleotide
  modified_base 1: mod_base = OTHER; note = 2'-O-methyladenosine-3'- phosphorothioate
  modified_base 2: mod_base = OTHER; note = 2'-O-methyladenosine-3'- phosphorothioate
  modified_base 3: mod_base = OTHER; note = 2'-O-methyladenosine-3'-phosphate
  modified_base 4: mod_base = OTHER; note = 2'-O-methyladenosine-3'-phosphate
  modified_base 5: mod_base = OTHER; note = 2'-O-methyladenosine-3'-phosphate
  modified_base 6: mod_base = OTHER; note = 2'-O-methyladenosine-3'-phosphate
  modified_base 7: mod_base = OTHER; note = 2'-fluoroguanosine-3'-phosphate
  modified_base 8: mod_base = OTHER; note = 2'-O-methyluridine-3'-phosphate
  modified_base 9: mod_base = OTHER; note = 2'-fluoroguanosine-3'-phosphate
  modified_base 10: mod_base = OTHER; note = 2'-fluorouridine-3'-phosphate
  modified_base 11: mod_base = OTHER; note = 2'-fluorouridine-3'-phosphate
  modified_base 12: mod_base = OTHER; note = 2'-O-methylcytidine-3'-phosphate
  modified_base 13: mod_base = OTHER; note = 2'-O-methylcytidine-3'-phosphate
  modified_base 14: mod_base = OTHER; note = 2'-O-methylcytidine-3'-phosphate
  modified_base 15: mod_base = OTHER; note = 2'-O-methyluridine-3'-phosphate
  modified_base 16: mod_base = OTHER; note = 2'-O-methyluridine-3'-phosphate
  modified_base 17: mod_base = OTHER; note = 2'-O-methyluridine-3'-phosphate
  modified_base 18: mod_base = OTHER; note = 2'-O-methyluridine-3'-phosphate
  modified_base 19: mod_base = OTHER; note = 2'-O-methylcytidine-3'-phosphate
  modified_base 20: mod_base = OTHER; note = 2'-O-methyladenosine-3'-phosphate
  modified_base 21: mod_base = OTHER; note = 2'-O-methyladenosine-3'-phosphate N-[tris(GalNAc-alkyl)-amidodecanoyl)]-4-hydroxyprolinol Hyp-(GalNAc-alkyl)3
aaaaaagtgttcccttttcaa

SEQ ID NO: 1048 - RNA, 23 nt, synthetic construct
  source 1..23: mol_type = other RNA; note = Description of Artificial Sequence: Synthetic oligonucleotide
  modified_base 1: mod_base = OTHER; note = 2'-O-methyluridine-3'-phosphorothioate
  modified_base 2: mod_base = OTHER; note = 2'-fluorouridine -3'-phosphorothioate
  modified_base 3: mod_base = OTHER; note = 2'-O-methylguanosine-3'-phosphate
  modified_base 4: mod_base = OTHER; note = 2'-O-methyladenosine-3'-phosphate
  modified_base 5: mod_base = OTHER; note = 2'-O-methyladenosine-3'-phosphate
  modified_base 6: mod_base = OTHER; note = 2'-fluoroadenosine-3'-phosphate
  modified_base 7: mod_base = OTHER; note = 2'-O-methyladenosine-3'-phosphate
  modified_base 8: mod_base = OTHER; note = 2'-O-methylguanosine-3'-phosphate
  modified_base 9: mod_base = OTHER; note = 2'-O-methylguanosine-3'-phosphate
  modified_base 10: mod_base = OTHER; note = 2'-O-methylguanosine-3'-phosphate
  modified_base 11: mod_base = OTHER; note = 2'-O-methyladenosine-3'-phosphate
  modified_base 12: mod_base = OTHER; note = 2'-O-methyladenosine-3'-phosphate
  modified_base 13: mod_base = OTHER; note = 2'-O-methylcytidine-3'-phosphate
  modified_base 14: mod_base = OTHER; note = 2'-fluoroadenosine-3'-phosphate
  modified_base 15: mod_base = OTHER; note = 2'-O-methylcytidine-3'-phosphate
  modified_base 16: mod_base = OTHER; note = 2'-fluorouridine-3'-phosphate
  modified_base 17: mod_base = OTHER; note = 2'-O-methyluridine-3'-phosphate
  modified_base 18: mod_base = OTHER; note = 2'-O-methyluridine-3'-phosphate
  modified_base 19: mod_base = OTHER; note = 2'-O-methyluridine-3'-phosphate
  modified_base 20: mod_base = OTHER; note = 2'-O-methyluridine-3'-phosphate
  modified_base 21: mod_base = OTHER; note = 2'-O-methyluridine-3'-phosphorothioate
  modified_base 22: mod_base = OTHER; note = 2'-O-methylguanosine-3'- phosphorothioate
  modified_base 23: mod_base = OTHER; note = 2'-O-methyluridine-3'-phosphate
ttgaaaagggaacacttttttgt

SEQ ID NO: 1049 - RNA, 21 nt, synthetic construct
  source 1..21: mol_type = other RNA; note = Description of Artificial Sequence: Synthetic oligonucleotide
  modified_base 1: mod_base = OTHER; note = 2'-O-methyladenosine-3'- phosphorothioate
  modified_base 2: mod_base = OTHER; note = 2'-O-methyladenosine-3'- phosphorothioate
  modified_base 3: mod_base = OTHER; note = 2'-O-methyladenosine-3'-phosphate
  modified_base 4: mod_base = OTHER; note = 2'-O-methyladenosine-3'-phosphate
  modified_base 5: mod_base = OTHER; note = 2'-O-methyladenosine-3'-phosphate
  modified_base 6: mod_base = OTHER; note = 2'-O-methyladenosine-3'-phosphate
  modified_base 7: mod_base = OTHER; note = 2'-fluoroguanosine-3'-phosphate
  modified_base 8: mod_base = OTHER; note = 2'-O-methyluridine-3'-phosphate
  modified_base 9: mod_base = OTHER; note = 2'-fluoroguanosine-3'-phosphate
  modified_base 10: mod_base = OTHER; note = 2'-fluorouridine-3'-phosphate
  modified_base 11: mod_base = OTHER; note = 2'-fluorouridine-3'-phosphate
  modified_base 12: mod_base = OTHER; note = 2'-O-methylcytidine-3'-phosphate
  modified_base 13: mod_base = OTHER; note = 2'-O-methylcytidine-3'-phosphate
  modified_base 14: mod_base = OTHER; note = 2'-O-methylcytidine-3'-phosphate
  modified_base 15: mod_base = OTHER; note = 2'-O-methyluridine-3'-phosphate
  modified_base 16: mod_base = OTHER; note = 2'-O-methyluridine-3'-phosphate
  modified_base 17: mod_base = OTHER; note = 2'-O-methyluridine-3'-phosphate
  modified_base 18: mod_base = OTHER; note = 2'-O-methyluridine-3'-phosphate
  modified_base 19: mod_base = OTHER; note = 2'-O-methylcytidine-3'-phosphate
  modified_base 20: mod_base = OTHER; note = 2'-O-methyladenosine-3'-phosphate
  modified_base 21: mod_base = OTHER; note = 2'-O-methyladenosine-3'-phosphate N-[tris(GalNAc-alkyl)-amidodecanoyl)]-4-hydroxyprolinol Hyp-(GalNAc-alkyl)3
aaaaaagtgttcccttttcaa

SEQ ID NO: 1050 - RNA, 23 nt, synthetic construct
  source 1..23: mol_type = other RNA; note = Description of Artificial Sequence: Synthetic oligonucleotide
  modified_base 1: mod_base = OTHER; note = 2'-O-methyluridine-3'-phosphorothioate
  modified_base 2: mod_base = OTHER; note = 2'-fluorouridine -3'-phosphorothioate
  modified_base 3: mod_base = OTHER; note = 2'-O-methylguanosine-3'-phosphate
  modified_base 4: mod_base = OTHER; note = 2'-O-methyladenosine-3'-phosphate
  modified_base 5: mod_base = OTHER; note = 2'-O-methyladenosine-3'-phosphate
  modified_base 6: mod_base = OTHER; note = 2'-fluoroadenosine-3'-phosphate
  modified_base 7: mod_base = OTHER; note = 2'-O-methyladenosine-3'-phosphate
  modified_base 8: mod_base = OTHER; note = 2'-fluoroguanosine-3'-phosphate
  modified_base 9: mod_base = OTHER; note = 2'-fluoroguanosine-3'-phosphate
  modified_base 10: mod_base = OTHER; note = 2'-O-methylguanosine-3'-phosphate
  modified_base 11: mod_base = OTHER; note = 2'-O-methyladenosine-3'-phosphate
  modified_base 12: mod_base = OTHER; note = 2'-O-methyladenosine-3'-phosphate
  modified_base 13: mod_base = OTHER; note = 2'-O-methylcytidine-3'-phosphate
  modified_base 14: mod_base = OTHER; note = 2'-fluoroadenosine-3'-phosphate
  modified_base 15: mod_base = OTHER; note = 2'-O-methylcytidine-3'-phosphate
  modified_base 16: mod_base = OTHER; note = 2'-fluorouridine-3'-phosphate
  modified_base 17: mod_base = OTHER; note = 2'-O-methyluridine-3'-phosphate
  modified_base 18: mod_base = OTHER; note = 2'-O-methyluridine-3'-phosphate
  modified_base 19: mod_base = OTHER; note = 2'-O-methyluridine-3'-phosphate
  modified_base 20: mod_base = OTHER; note = 2'-O-methyluridine-3'-phosphate
  modified_base 21: mod_base = OTHER; note = 2'-O-methyluridine-3'-phosphorothioate
  modified_base 22: mod_base = OTHER; note = 2'-O-methylguanosine-3'- phosphorothioate
  modified_base 23: mod_base = OTHER; note = 2'-O-methyluridine-3'-phosphate
ttgaaaagggaacacttttttgt

SEQ ID NO: 1051 - RNA, 22 nt, synthetic construct
  source 1..22: mol_type = other RNA
ttagaagaaaaggtgggagact

SEQ ID NO: 1052 - RNA, 21 nt, synthetic construct
  source 1..21: mol_type = other RNA
  modified_base 1: mod_base = OTHER; note = 2'-O-methyluridine-3'-phosphorothioate
  modified_base 2: mod_base = OTHER; note = 2'-O-methylcytidine-3'- phosphorothioate
  modified_base 3: mod_base = OTHER; note = 2'-O-methyluridine-3'-phosphate
  modified_base 4: mod_base = OTHER; note = 2'-O-methylcytidine-3'-phosphate
  modified_base 5: mod_base = OTHER; note = 2'-O-methylcytidine-3'-phosphate
  modified_base 6: mod_base = OTHER; note = 2'-O-methylcytidine-3'-phosphate
  modified_base 7: mod_base = OTHER; note = 2'-fluoroadenosine-3'-phosphate
  modified_base 8: mod_base = OTHER; note = 2'-O-methylcytidine-3'-phosphate
  modified_base 9: mod_base = OTHER; note = 2'-fluorocytidine-3'-phosphate
  modified_base 10: mod_base = OTHER; note = 2'-fluorouridine-3'-phosphate
  modified_base 11: mod_base = OTHER; note = 2'-fluorouridine-3'-phosphate
  modified_base 12: mod_base = OTHER; note = 2'-O-methyluridine-3'-phosphate
  modified_base 13: mod_base = OTHER; note = 2'-O-methyluridine-3'-phosphate
  modified_base 14: mod_base = OTHER; note = 2'-O-methylcytidine-3'-phosphate
  modified_base 15: mod_base = OTHER; note = 2'-O-methyluridine-3'-phosphate
  modified_base 16: mod_base = OTHER; note = 2'-O-methyluridine-3'-phosphate
  modified_base 17: mod_base = OTHER; note = 2'-O-methylcytidine-3'-phosphate
  modified_base 18: mod_base = OTHER; note = 2'-O-methyluridine-3'-phosphate
  modified_base 19: mod_base = OTHER; note = 2'-O-methyladenosine-3'-phosphate
  modified_base 20: mod_base = OTHER; note = 2'-O-methyladenosine-3'-phosphate
  modified_base 21: mod_base = OTHER; note = 2'-O-methyluridine-3'-phosphate N-[tris(GalNAc-alkyl)-amidodecanoyl)]-4-hydroxyprolinol Hyp-(GalNAc-alkyl)3
tctcccaccttttcttctaat

1. A double-stranded ribonucleic acid (RNAi) agent for inhibiting expression of angiotensinogen (AGT) in a cell, wherein said double-stranded RNAi agent comprises a sense strand and an antisense strand forming a double-stranded region, wherein said sense strand comprises at least 15 contiguous nucleotides differing by no more than 3 nucleotides from the nucleotide sequence of SEQ ID NO:1, and said antisense strand comprises at least 15 contiguous nucleotides differing by no more than 3 nucleotides from the nucleotide sequence of SEQ ID NO:2,
wherein substantially all of the nucleotides of said sense strand and substantially all of the nucleotides of said antisense strand are modified nucleotides, and
wherein said sense strand is conjugated to a ligand attached at the 3′-terminus.

2. The double-stranded ribonucleic acid RNAi agent of claim 1,
wherein the sense strand comprises at least 15 contiguous nucleotides differing by no more than 3 nucleotides from nucleotides 2801-2101; 803-843; 834-859; 803-859; 803-875; 834-875; 847-875; 1247-1271; 1566-1624; 1570-1624; 1584-1624; 1584-1624; 1584-1621; 2035-2144; 2070-2144; 2070-2103; 2201-2223; 2227-2360; 2227-2304; 2290-2318; 2304-2350; 2304-2326; 2320-2342; 2333-2360; 2333-2358; 485-503; 517-535; 560-578; 635-653; 803-821; 814-832; 822-840; 825-843; 834-852; 837-855; 841-859; 855-873; 967-985; 1247-1265; 1248-1266; 1249-1267; 1251-1269; 1253-1271; 1566-1584; 1570-1588; 1572-1590; 1574-1592; 1584-1602; 1587-1605; 1591-1609; 1592-1610; 1595-1613; 1601-1619; 1602-1620; 1605-1623; 1729-1747; 1738-1756; 1739-1757; 1741-1769; 1767-1785; 1810-1828; 1827-1845; 1880-1989; 1892-1914; 1894-1914; 1894-2012; 2035-2053; 2046-2064; 2057-2075; 2070-2088; 2072-2090; 2078-2096; 2078-2107; 2078-2011; 2080-2098; 2081-2099; 2081-2104; 2081-2011; 2082-2100; 2084-2102; 2084-2011; 2090-2108; 2100-2118; 2111-2129; 2124-2142; 2125-2143; 2167-2185; 2179-2197; 2201-2219; 2202-2220; 2203-2221; 2204-2222; 2227-2245; 2230-2248; 2234-2252; 2244-2264; 2255-2273; 2266-2284; 2268-2286; 2270-2288; 2279-2297; 2281-2299; 2283-2301; 2284-2302; 2285-2303; 2286-2304; 2288-2306; 2290-2308; 2291-2309; 2291-2311; 2291-2318; 2291-2315; 2292-2310; 2294-2312; 2296-2314; 2299-2317; 2304-2322; 2304-2329; 2306-2324; 2307-2325; 2309-2327; 2309-2329; 2309-2342; 2309-2350; 2309-2358; 2314-2332; 2316-2334; 2317-2335; 2320-2338; 2321-2339; 2323-2341; 2325-2343; 2326-2344; 2328-2346; 2329-2347; 2331-2349; 2333-2351; 2334-2352; 2335-2353; 2339-2357; 2340-2358; or 2341-2359 of the nucleotide sequence of SEQ ID NO:1 and the antisense strand comprises at least 15 contiguous nucleotides differing by no more than 3 nucleotides from the nucleotides at the corresponding position of the nucleotide sequence of SEQ ID NO:2, and
wherein the antisense strand is substantially complementary to the sense strand.

3. The double-stranded RNAi agent of claim 2, wherein substantially all of the nucleotides of said sense strand are modified nucleotides, substantially all of the nucleotides of said antisense strand are modified nucleotides, or substantially all of the nucleotides of said sense strand and substantially all of the nucleotides of said antisense strand are modified nucleotides.

4. The double-stranded RNAi agent of claim 2, wherein said sense strand is conjugated to a ligand attached at the 3′-terminus.

5. (canceled)

6. (canceled)

7. The double-stranded RNAi agent of claim 1, wherein at least one of said modified nucleotides is selected from the group consisting of a 3′-terminal deoxy-thymine (dT) nucleotide, a 2′-O-methyl modified nucleotide, a 2′-fluoro modified nucleotide, a 2′-deoxy-modified nucleotide, a locked nucleotide, an unlocked nucleotide, a conformationally restricted nucleotide, a constrained ethyl nucleotide, an abasic nucleotide, a 2′-amino-modified nucleotide, a 2′-alkyl-modified nucleotide, a morpholino nucleotide, a phosphoramidate, a non-natural base comprising nucleotide, a nucleotide comprising a 5′-phosphorothioate group, and a terminal nucleotide linked to a cholesteryl derivative or a dodecanoic acid bisdecylamide group.

8. The double-stranded RNAi agent of claim 1, wherein at least one strand comprises a 3′ overhang of at least 1 nucleotide; or at least one strand comprises a 3′ overhang of at least 2 nucleotides.

9.-20. (canceled)

21. The double-stranded RNAi agent of claim 1, wherein the double-stranded region is 15-30 nucleotide pairs in length: 17-23 nucleotide pairs in length: 17-25 nucleotide pairs in length: 23-27 nucleotide pairs in length: 19-21 nucleotide pairs in length: or 21-23 nucleotide pairs in length.

22.-26. (canceled)

27. The double-stranded RNAi agent of claim 1, wherein each strand is independently 15-30 nucleotides in length: or 19-30 nucleotides in length.

28.-30. (canceled)

31. The double-stranded RNAi agent of claim 1, wherein the ligand is one or more GalNAc derivatives attached through a bivalent or trivalent branched linker.

32. The double-stranded RNAi agent of claim 1, wherein the ligand is

[chemical structure]

33. The double-stranded RNAi agent of claim 1, wherein the ligand is attached to the 3′ end of the sense strand.

34. The double-stranded RNAi agent of claim 33, wherein the RNAi agent is conjugated to the ligand as shown in the following schematic [chemical structure]
wherein X is O or S.

35. The double-stranded RNAi agent of claim 1, wherein said RNAi agent further comprises at least one phosphorothioate or methylphosphonate internucleotide linkage.

36.-52. (canceled)

53. The double-stranded RNAi agent of claim 1, wherein the sense strand is 21 nucleotides in length and the antisense strand is 23 nucleotides in length.

54. (canceled)

55. (canceled)

56. The double-stranded RNAi agent of claim 1, wherein said RNAi agent is selected from the group of RNAi agents listed in any one of Tables 3, 4, 7, 8, 11, 13, and 15.

57.-67. (canceled)

68. A cell containing the double-stranded RNAi agent of claim 1.

69. A pharmaceutical composition comprising the double-stranded RNAi agent of claim 1.

70.-74. (canceled)

75. A method of inhibiting angiotensinogen (AGT) expression in a cell, the method comprising:
(a) contacting the cell with the double-stranded RNAi agent of claim 1, or the pharmaceutical composition of claim 69; and
(b) maintaining the cell produced in step (a) for a time sufficient to obtain degradation of the mRNA transcript of a AGT gene, thereby inhibiting expression of the AGT gene in the cell.

76.-79. (canceled)

80. A method of treating a subject having a angiotensinogen (AGT)-associated disorder, comprising administering to the subject a therapeutically effective amount of the double-stranded RNAi agent of claim 1, or the pharmaceutical composition of claim 69, thereby treating said subject.

81.-83. (canceled)

84. The method of claim 80, wherein the subject is a human.

85. The method of claim 84, wherein the angiotensinogen-associated disease is selected from the group consisting of hypertension, borderline hypertension, primary hypertension, secondary hypertension, hypertensive emergency, hypertensive urgency, isolated systolic or diastolic hypertension, pregnancy-associated hypertension, diabetic hypertension, resistant hypertension, refractory hypertension, paroxysmal hypertension, renovascular hypertension, Goldblatt hypertension, ocular hypertension, glaucoma, pulmonary hypertension, portal hypertension, systemic venous hypertension, systolic hypertension, labile hypertension; hypertensive heart disease, hypertensive nephropathy, atherosclerosis, arteriosclerosis, vasculopathy, diabetic nephropathy, diabetic retinopathy, chronic heart failure, cardiomyopathy, diabetic cardiac myopathy, glomerulosclerosis, coarctation of the aorta, aortic aneurism, ventricular fibrosis, Cushing's syndrome, and other glucocorticoid excess states including chronic steroid therapy, pheochromocytoma, reninoma, secondary aldosteronism and other mineralocorticoid excess states, sleep apnea, thyroid/parathyroid disease, heart failure, myocardial infarction, angina, stroke, diabetes mellitus, renal disease, renal failure, systemic sclerosis, intrauterine growth restriction (IUGR), and fetal growth restriction.

86.-101. (canceled)
